(19) United States
(12) Patent Application Publication
(10) Pub. No.: US 2022/0143221 A1
(43) Pub. Date: May 12, 2022

(54) Gene Therapy For Eye Pathologies

(71) Applicant: REGENXBIO, Inc., Rockville, MD (US)

(72) Inventors: Olivier Danos, Princeton, NJ (US); Sherri Van Everen, Menlo Park, CA (US); Jesse I. Yoo, Atlanta, GA (US); Samir Maganbhai Patel, Columbus, NJ (US); Avanti Arvind Ghanekar, St. Louis, MO (US); Anthony Ray O'Berry, Clarksburg, MD (US); Kim Rees Irwin-Pack, Milcreek, UT (US); Darin Thomas Curtiss, Potomac, MD (US)

(73) Assignee: REGENXBIO, Inc., Rockville, MD (US)

(21) Appl. No.: 17/600,377

(22) PCT Filed: Apr. 2, 2020
(86) PCT No.: PCT/US2020/026356

§ 371 Date: Sep. 30, 2021

Related U.S. Application Data
(60) Provisional application No. 62/828,949, filed on Apr. 3, 2019.
(60) Provisional application No. 62/856,533, filed on Jun. 3, 2019.
(60) Provisional application No. 62/946,158, filed on Dec. 10, 2019.

(51) Int. Cl. A61K 48/00; A61P 27/02

(52) U.S. Cl. CPC A61K 48/0075; A61P 27/02

(57) ABSTRACT

Compositions and methods are described for the delivery of therapeutic products (such as therapeutic proteins (for example, antibodies), therapeutic RNAs (for example, shRNAs, siRNAs, and miRNAs), and therapeutic aptamers) to the retina/vitreal humour in the eyes of human subjects to treat pathologies of the eye, involving, for example, recombinant viral vectors such as recombinant adeno-associated virus (rAAV) vectors.

### 1. CROSS-REFERENCE TO RELATED APPLICATIONS

[0001] This application claims the benefit of U.S. Provisional Patent Application Nos. 62/828,949, filed Apr. 3, 2019, 62/856,533, filed Jun. 3, 2019, and 62/946,158, filed Dec. 10, 2019, which are incorporated by reference herein in their entireties.

### REFERENCE TO SEQUENCE LISTING SUBMITTED ELECTRONICALLY

[0002] This application incorporates by reference a Sequence Listing submitted with this application as text file entitled “12656-126-228_Sequence_Listing.txt” created on Mar. 24, 2020 and having a size of 2,025,574 bytes.

### 2. INTRODUCTION

[0003] Compositions and methods are described for the delivery of therapeutic products (such as therapeutic proteins (for example, antibodies), therapeutic RNAs (for example, shRNAs, siRNAs, and miRNAs), and therapeutic aptamers) to the retina/vitreal humour in the eyes of human subjects to treat pathologies of the eye, involving, for example, recombinant viral vectors such as recombinant adeno-associated virus (rAAV) vectors.

### 3. BACKGROUND OF THE INVENTION

[0004] The human eye is a highly intricate and highly developed sensory organ, which is prone to a host of diseases and disorders. About 285 million people in the world are visually impaired, of whom 39 million are blind and 246 million have moderate to severe visual impairment (World Health Organization, 2012, “Global Data On Visual Impairments 2010,” Geneva: World Health Organization). Some of the leading causes of blindness are cataract (47%), glaucoma (12%), age-related macular degeneration (AMD) (9%), and diabetic retinopathy (5%) (World Health Organization, 2007, “Global Initiative For The Elimination Of Avoidable Blindness: Action Plan 2006-2011,” Geneva: World Health Organization).

[0005] An extensive number of ocular diseases and diseases with pathological manifestations in the eye can be traced to genetic alterations or protein dysregulations (Stone et al., 2017, Ophthalmology 124(9): 1314-1331). Recent advances in genomics and proteomics have made a huge impact in our understanding of disease mechanisms and/or genetic basis underlying such ocular diseases or manifestations. Gene therapy has been employed in treating certain eye diseases (see, e.g. International Patent Application No. PCT/US2017/027650 (International Publication No. WO 2017/181021 A1)).

[0006] There is a significant unmet medical need for therapies that specifically address the underlying genetic anomalies to treat ocular pathologies.

### 4. SUMMARY OF THE INVENTION

[0007] Compositions and methods are described for the delivery of therapeutic products (such as therapeutic proteins (for example, antibodies), therapeutic RNAs (for example, shRNAs, siRNAs, and miRNAs), and therapeutic aptamers) to the retina/vitreal humour in the eyes of human subjects to treat pathologies of the eye, involving, for example, recombinant viral vectors such as recombinant adeno-associated virus (rAAV) vectors. The therapeutic products can be, for example, therapeutic proteins (for example, antibodies), therapeutic RNAs (for example, shRNAs, siRNAs, and miRNAs), or therapeutic aptamers. In a specific embodiment, the therapeutic products is a human protein or an antibody against a human protein. Antibodies include, but are not limited to, monoclonal antibodies, polyclonal antibodies, recombinantly produced antibodies, human antibodies, humanized antibodies, chimeric antibodies, synthetic antibodies, tetrameric antibodies comprising two heavy chain and two light chain molecules, antibody light chain monomers, antibody heavy chain monomers, antibody light chain dimers, antibody heavy chain dimers, antibody light chain-heavy chain pairs, intrabodies, heteroconjugate antibodies, monovalent antibodies, antigen-binding fragments of full-length antibodies, and fusion proteins of the above. Such antigen-binding fragments include, but are not limited to, single-domain antibodies (variable domain of heavy chain antibodies (VHHs) or nanobodies), Fabs, F(ab′)₂s, and scFvs (single-chain variable fragments). In certain embodiment, the therapeutic product (for example, a therapeutic protein) is post-translationally modified. In a specific embodiment, the post-translational modification is specific to the cell type, to which the therapeutic product (for example, a therapeutic protein) is delivered using a specific route as described herein. Delivery may be accomplished via gene therapy—e.g., by administering a recombinant viral vector or a recombinant DNA expression construct (collectively, a “recombinant vector”) encoding an therapeutic product to the suprachoroidal space, subretinal space (with vitrectomy, or without vitrectomy (e.g., with a catheter through the suprachoroidal space, or via peripheral injection), intraretinal space, and/or outer surface of the sclera (i.e., juxtascleral administration) in the eye(s) of a human patient, to create a permanent depot in the eye that continuously supplies the therapeutic product (e.g., a post-translationally modified therapeutic product).

[0008] In one aspect, provided herein is a method of subretinal administration without vitrectomy for treating a pathology of the eye, comprising administering to the subretinal space in the eye of a human subject in need of treatment a recombinant viral vector comprising a nucleotide sequence encoding a therapeutic product such that the therapeutic product is expressed and results in treatment of the pathology of the eye, wherein the method does not comprise performing a vitrectomy on the eye of said human patient. In certain embodiments, the administering step comprises administering to the subretinal space in the eye of said human subject the recombinant viral vector therapeutic product via the suprachoroidal space in the eye of said human subject. In certain embodiments, the administering step is by the use of a subretinal drug delivery device comprising a catheter that can be inserted and tunneled through the suprachoroidal space toward the posterior pole, where a small needle injects into the subretinal space. In certain embodiments, the administering step comprises inserting and tunneling the catheter of the subretinal drug delivery device through the suprachoroidal space.

[0009] In another aspect, provided herein is a method for treating a pathology of the eye, comprising administering to the subretinal space in the eye of a human subject in need of treatment a recombinant viral vector comprising a nucleotide sequence encoding a therapeutic product such that the therapeutic product is expressed and results in treatment of the pathology of the eye, wherein the method does not comprise performing a vitrectomy on the eye of said human patient. In certain embodiments, the administering step comprises administering to the subretinal space in the eye of said human subject the recombinant viral vector therapeutic product via the suprachoroidal space in the eye of said human subject. In certain embodiments, the administering step is by the use of a subretinal drug delivery device comprising a catheter that can be inserted and tunneled through the suprachoroidal space toward the posterior pole, where a small needle injects into the subretinal space. In certain embodiments, the administering step comprises inserting and tunneling the catheter of the subretinal drug delivery device through the suprachoroidal space.

[0010] In one aspect, provided herein is a method of subretinal administration with vitrectomy for treating a pathology of the eye, comprising administering to the subretinal space in the eye of a human subject in need of treatment a recombinant viral vector comprising a nucleotide sequence encoding a therapeutic product such that the therapeutic product is expressed and results in treatment of the pathology of the eye, wherein the method comprises performing a vitrectomy on the eye of said human patient. In certain embodiments, the vitrectomy is a partial vitrectomy.

[0011] In another aspect, provided herein is a method for treating a pathology of the eye, comprising administering to the subretinal space in the eye of a human subject in need of treatment a recombinant viral vector comprising a nucleotide sequence encoding a therapeutic product such that the therapeutic product is expressed and results in treatment of the pathology of the eye, wherein the method comprises performing a vitrectomy on the eye of said human patient. In certain embodiments, the vitrectomy is a partial vitrectomy.

[0012] In one aspect, provided herein is a method of suprachoroidal administration for treating a pathology of the eye, comprising administering to the suprachoroidal space in the eye of a human subject in need of treatment a recombinant viral vector comprising a nucleotide sequence encoding a therapeutic product such that the therapeutic product is expressed and results in treatment of the pathology of the eye. In certain embodiments, the administering step is by injecting the recombinant viral vector into the suprachoroidal space using a suprachoroidal drug delivery device. In certain embodiments, the suprachoroidal drug delivery device is a microinjector.

[0013] In another aspect, provided herein is a method for treating a pathology of the eye, comprising administering to the suprachoroidal space in the eye of a human subject in need of treatment a recombinant viral vector comprising a nucleotide sequence encoding a therapeutic product such that the therapeutic product is expressed and results in treatment of the pathology of the eye. In certain embodiments, the administering step is by injecting the recombinant viral vector into the suprachoroidal space using a suprachoroidal drug delivery device. In certain embodiments, the suprachoroidal drug delivery device is a microinjector.

[0014] In certain embodiments, delivery to the subretinal or suprachoroidal space can be performed using the methods and/or devices described and disclosed in International Publication Nos. WO 2016/042162, WO 2017/046358, WO 2017/158365, and WO 2017/158366, each of which is incorporated by reference in its entirety.

[0015] In one aspect, provided herein is a method of administration to the outer space of the sclera for treating a pathology of the eye, comprising administering to the outer surface of the sclera in the eye of a human subject in need of treatment a recombinant viral vector comprising a nucleotide sequence encoding a therapeutic product such that the therapeutic product is expressed and results in treatment of the pathology of the eye. In certain embodiments, the administering step is by the use of a juxtascleral drug delivery device that comprises a cannula whose tip can be inserted and kept in direct apposition to the scleral surface. In certain embodiments, the administering step comprises inserting and keeping the tip of the cannula in direct apposition to the scleral surface.

[0016] In another aspect, provided herein is a method for treating a pathology of the eye, comprising administering to the outer surface of the sclera in the eye of a human subject in need of treatment a recombinant viral vector comprising a nucleotide sequence encoding a therapeutic product such that the therapeutic product is expressed and results in treatment of the pathology of the eye. In certain embodiments, the administering step is by the use of a juxtascleral drug delivery device that comprises a cannula whose tip can be inserted and kept in direct apposition to the scleral surface. In certain embodiments, the administering step comprises inserting and keeping the tip of the cannula in direct apposition to the scleral surface

[0017] In certain embodiments, the therapeutic product is not an anti-human vascular endothelial growth factor (hVEGF) antibody.

[0018] In certain embodiments, the pathology of the eye is not associated with neovascular age-related macular degeneration (nAMD) (also known as the “wet,” neovascular form of AMD (“WAMD” or “wet AMD”)).

[0019] In certain embodiments, the therapeutic product is an anti-hVEGF antibody.

[0020] In certain embodiments, the pathology of the eye is associated with nAMD.

[0021] In certain embodiments, the pathology of the eye is associated with nAMD and the therapeutic product is an anti-hVEGF antibody.

[0022] In one aspect, provided herein is a method of subretinal administration accompanied by vitrectomy for treating a pathology of the eye, comprising administering to the subretinal space in the eye of a human subject in need of treatment a recombinant viral vector comprising a nucleotide sequence encoding a therapeutic product such that the therapeutic product is expressed and results in treatment of the pathology of the eye, wherein the method comprises performing a vitrectomy on the eye of said human patient, and wherein the therapeutic product is not anti-human vascular endothelial growth factor (hVEGF) antibody. In certain embodiments, the pathology of the eye is an ocular disease or a disease involving multiple organs including the eye. In certain embodiments, the vitrectomy is a partial vitrectomy.

[0023] In another aspect, provided herein is a method for treating a pathology of the eye, comprising administering to the subretinal space in the eye of a human subject in need of treatment a recombinant viral vector comprising a nucleotide sequence encoding a therapeutic product such that the therapeutic product is expressed and results in treatment of the pathology of the eye, wherein the method comprises performing a vitrectomy on the eye of said human patient, and wherein the therapeutic product is not anti-human vascular endothelial growth factor (hVEGF) antibody. In certain embodiments, the pathology of the eye is an ocular disease or a disease involving multiple organs including the eye. In certain embodiments, the vitrectomy is a partial vitrectomy.

[0024] In one aspect, provided herein is a method of subretinal administration for treating a pathology of the eye, comprising administering to the subretinal space peripheral to the optic disc, fovea and macula located in the back of the eye of a human subject in need of treatment a recombinant viral vector comprising a nucleotide sequence encoding a therapeutic product such that the therapeutic product is expressed and results in treatment of the pathology of the eye, wherein the method does not comprise performing a vitrectomy on the eye of said human patient. In certain embodiments, the injecting step is by transvitreal injection. In certain embodiments, the method of transvitreal administration results in uniform expression of the therapeutic product throughout the eye (e.g. the expression level at the site of injection varies by less than 5%, 10%, 20%, 30%, 40%, or 50% as compared to the expression level at other areas of the eye). In certain embodiments, the transvitreal injection comprises inserting a sharp needle into the sclera via the superior or inferior side of the eye and passing the sharp needle all the way through the vitreous to inject the recombinant viral vector to the subretinal space on the other side. In certain embodiments, a needle is inserted at the 2 or 10 o'clock position. In certain embodiments, the transvitreal injection comprises inserting a trochar into the sclera and inserting a cannula through the trochar and through the vitreous to inject the recombinant viral vector to the subretinal space on the other side. In certain embodiments, the therapeutic product is an anti-hVEGF antibody. In certain embodiments, the anti-hVEGF antibody is an anti-hVEGF antigen-binding fragment. In certain embodiments, the anti-hVEGF antigen-binding fragment is a Fab, F(ab′)₂, or single chain variable fragment (scFv). In certain embodiments, the anti-hVEGF antibody comprises a heavy chain comprising the amino acid sequence of SEQ ID NO:2 or SEQ ID NO:4, and a light chain comprising the amino acid sequence of SEQ ID NO:1, or SEQ ID NO:3. In certain embodiments, wherein the anti-hVEGF antibody comprises light chain CDRs 1-3 of SEQ ID NOs:14-16 and heavy chain CDRs 1-3 of SEQ ID NOs:17-19 or SEQ ID NOs:20, 18, and 21. In certain embodiments, wherein the pathology of the eye is associated with nAMD, dry age-related macular degeneration (dry AMD), retinal vein occlusion (RVO), diabetic macular edema (DME), or diabetic retinopathy (DR). In certain embodiments, the pathology of the eye is associated with nAMD.

[0025] In another aspect, provided herein is a method for treating a pathology of the eye, comprising administering to the subretinal space peripheral to the optic disc, fovea and macula located in the back of the eye of a human subject in need of treatment a recombinant viral vector comprising a nucleotide sequence encoding a therapeutic product such that the therapeutic product is expressed and results in treatment of the pathology of the eye, wherein the method does not comprise performing a vitrectomy on the eye of said human patient. In certain embodiments, the injecting step is by transvitreal injection. In certain embodiments, the method of transvitreal administration results in uniform expression of the therapeutic product throughout the eye (e.g. the expression level at the site of injection varies by less than 5%, 10%, 20%, 30%, 40%, or 50% as compared to the expression level at other areas of the eye). In certain embodiments, the transvitreal injection comprises inserting a sharp needle into the sclera via the superior or inferior side of the eye and passing the sharp needle all the way through the vitreous to inject the recombinant viral vector to the subretinal space on the other side. In certain embodiments, a needle is inserted at the 2 or 10 o'clock position. In certain embodiments, the transvitreal injection comprises inserting a trochar into the sclera and inserting a cannula through the trochar and through the vitreous to inject the recombinant viral vector to the subretinal space on the other side. In certain embodiments, the therapeutic product is an anti-hVEGF antibody. In certain embodiments, the anti-hVEGF antibody is an anti-hVEGF antigen-binding fragment. In certain embodiments, the anti-hVEGF antigen-binding fragment is a Fab, F(ab′)₂, or single chain variable fragment (scFv). In certain embodiments, the anti-hVEGF antibody comprises a heavy chain comprising the amino acid sequence of SEQ ID NO:2 or SEQ ID NO:4, and a light chain comprising the amino acid sequence of SEQ ID NO:1, or SEQ ID NO:3. In certain embodiments, wherein the anti-hVEGF antibody comprises light chain CDRs 1-3 of SEQ ID NOs:14-16 and heavy chain CDRs 1-3 of SEQ ID NOs:17-19 or SEQ ID NOs:20, 18, and 21. In certain embodiments, wherein the pathology of the eye is associated with nAMD, dry age-related macular degeneration (dry AMD), retinal vein occlusion (RVO), diabetic macular edema (DME), or diabetic retinopathy (DR). In certain embodiments, the pathology of the eye is associated with nAMD.

[0026] In certain embodiments of the methods described herein, (1) the pathology of the eye is associated with Batten-CLN1 and the therapeutic product is Palmitoyl-Protein Thioesterase 1 (PPT1); (2) the pathology of the eye is associated with Batten-CLN2 and the therapeutic product is Tripeptidyl-Peptidase 1 (TPP1); (3) the pathology of the eye is associated with Batten-CLN3 and the therapeutic product is Battenin (CLN3); (4) the pathology of the eye is associated with Batten-CLN6 and the therapeutic product is CLN6 Transmembrane ER Protein (CLN6); (5) the pathology of the eye is associated with Batten-CLN7 and the therapeutic product is Major Facilitator Superfamily Domain Containing 8 (MFSD8); (6) the pathology of the eye is associated with Usher's-Type 1 and the therapeutic product is Myosin VIIA (MYO7A); (7) the pathology of the eye is associated with Usher's-Type 1 and the therapeutic product is Cadherin Related 23 (CDH23); (8) the pathology of the eye is associated with Usher's-Type 2 and the therapeutic product is Protocadherin Related 15 (PCDH15); (9) the pathology of the eye is associated with Usher's-Type 2 and the therapeutic product is Usherin (USH2A); (10) the pathology of the eye is associated with Usher's-Type 3 and the therapeutic product is Clarin 1 (CLRN1); (11) the pathology of the eye is associated with Stargardt's and the therapeutic product is ATP Binding Cassette Subfamily A Member 4 (ABCA4); (12) the pathology of the eye is associated with Stargardt's and the therapeutic product is ELOVL Fatty Acid Elongase 4 (ELOVL4); (13) the pathology of the eye is associated with uveitis and the therapeutic product is an anti-Interleukin 6 (IL6) monoclonal antibody; (14) the pathology of the eye is associated with uveitis and the therapeutic product is an anti-TNF-alpha (TNF) monoclonal antibody; (15) the pathology of the eye is associated with diabetic macular edema (DME) and the therapeutic product is an anti-IL6 monoclonal antibody; (16) the pathology of the eye is associated with red-green color blindness and the therapeutic product is L opsin (OPN1LW); (17) the pathology of the eye is associated with red-green color blindness and the therapeutic product is M opsin (OPN1MW); (18) the pathology of the eye is associated with blue cone monochromacy and the therapeutic product is M opsin (OPN1MW); (19) the pathology of the eye is associated with Leber congenital amaurosis-1 (LCA 1) and the therapeutic product is Guanylate Cyclase 2D, Retinal (GUCY2D); (20) the pathology of the eye is associated with Leber congenital amaurosis-2 (LCA 2) and the therapeutic product is Retinoid Isomerohydrolase RPE65 (RPE65); (21) the pathology of the eye is associated with LCA 3 and the therapeutic product is Spermatogenesis Associated 7 (SPATA7); (22) the pathology of the eye is associated with Leber congenital amaurosis-4 (LCA 4) and the therapeutic product is Aryl Hydrocarbon Receptor Interacting Protein Like 1 (AIPL1); (23) the pathology of the eye is associated with Leber congenital amaurosis-5 (LCA 5) and the therapeutic product is Lebercilin (LCA5); (24) the pathology of the eye is associated with Leber congenital amaurosis-6 (LCA 6) and the therapeutic product is RPGR Interacting Protein 1 (RPGRIP1); (25) the pathology of the eye is associated with Leber congenital amaurosis-7 (LCA 7) and the therapeutic product is Cone-Rod Homeobox (CRX); (26) the pathology of the eye is associated with Leber congenital amaurosis-8 (LCA 8) and the therapeutic product is Crumbs Cell Polarity Complex Component 1 (CRB1) (also known as LCA8); (27) the pathology of the eye is associated with Leber congenital amaurosis-9 (LCA 9) and the therapeutic product is Nicotinamide Nucleotide Adenylyltransferase 1 (NMNAT1); (28) the pathology of the eye is associated with Leber congenital amaurosis-10 (LCA 10) and the therapeutic product is Centrosomal Protein 290 (CEP290); (29) the pathology of the eye is associated with Leber congenital amaurosis-11 (LCA 11) and the therapeutic product is Inosine Monophosphate Dehydrogenase 1 (IMPDH1); (30) the pathology of the eye is associated with Leber congenital amaurosis-12 (LCA 12) and the therapeutic product is Retinal Degeneration 3, GUCY2D regulator (RD3); (31) the pathology of the eye is associated with Leber congenital amaurosis-13 (LCA 13) and the therapeutic product is Retinol Dehydrogenase 12 (RDH12); (32) the pathology of the eye is associated with Leber congenital amaurosis-14 (LCA 14) and the therapeutic product is Lecithin Retinol Acyltransferase (LRAT); (33) the pathology of the eye is associated with Leber congenital amaurosis-15 (LCA 15) and the therapeutic product is Tubby Like Protein 1 (TULP1); (34) the pathology of the eye is associated with Leber congenital amaurosis-16 (LCA 16) and the therapeutic product is Potassium Voltage-Gated Channel Subfamily J Member 13 (KCNJ13); (35) the pathology of the eye is associated with Leber's hereditary optic neuropathy (LHON) and the therapeutic product is Mitochondrially Encoded NADH Dehydrogenase 1 (MT-ND1); (36) the pathology of the eye is associated with LHON and the therapeutic product is Mitochondrially Encoded NADH Dehydrogenase 4 (MT-ND4); (37) the pathology of the eye is associated with LHON and the therapeutic product is Mitochondrially Encoded NADH Dehydrogenase 6 (MT-ND6); (38) the pathology of the eye is associated with neuromyelitis optica (NMO) and the therapeutic product is an anti-complement antibody or an anti-complement aptamer, wherein the anti-complement monoclonal antibody or aptamer is an anti-complement C1 antibody or aptamer, an anti-complement C1q monoclonal antibody or aptamer, an anti-complement C1s monoclonal antibody or aptamer, an anti-complement C2 monoclonal antibody or aptamer, an anti-complement C2a monoclonal antibody or aptamer, an anti-complement C2b monoclonal antibody or aptamer, an anti-complement C3 monoclonal antibody or aptamer, an anti-complement C3a monoclonal antibody or aptamer, an anti-complement C3b monoclonal antibody or aptamer, an anti-complement C4 monoclonal antibody or aptamer, an anti-complement C4a monoclonal antibody or aptamer, an anti-complement C4b monoclonal antibody or aptamer, an anti-complement C5 monoclonal antibody or aptamer, an anti-complement C5a monoclonal antibody or aptamer, an anti-complement C5b monoclonal antibody or aptamer, an anti-complement C6 monoclonal antibody or aptamer, an anti-complement C7 monoclonal antibody or aptamer, an anti-complement C8 monoclonal antibody or aptamer, or an anti-complement C9 monoclonal antibody or aptamer, or preferably an anti-complement C5 antibody; (39) the pathology of the eye is associated with NMO and the therapeutic product is an anti-IL6 monoclonal antibody or aptamer; (40) the pathology of the eye is associated with uveitis and the therapeutic product is an anti-complement monoclonal antibody or aptamer, wherein the anti-complement monoclonal antibody or aptamer is an anti-complement C1 monoclonal antibody or aptamer, an anti-complement C1q monoclonal antibody or aptamer, an anti-complement C1s monoclonal antibody or aptamer, an anti-complement C2 monoclonal antibody or aptamer, an anti-complement C2a monoclonal antibody or aptamer, an anti-complement C2b monoclonal antibody or aptamer, an anti-complement C3 monoclonal antibody or aptamer, an anti-complement C3a monoclonal antibody or aptamer, an anti-complement C3b monoclonal antibody or aptamer, an anti-complement C4 monoclonal antibody or aptamer, an anti-complement C4a monoclonal antibody or aptamer, an anti-complement C4b monoclonal antibody or aptamer, an anti-complement C5 monoclonal antibody or aptamer, an anti-complement C5a monoclonal antibody or aptamer, an anti-complement C5b monoclonal antibody or aptamer, an anti-complement C6 monoclonal antibody or aptamer, an anti-complement C7 monoclonal antibody or aptamer, an anti-complement C8 monoclonal antibody or aptamer, or an anti-complement C9 monoclonal antibody or aptamers, or preferably an anti-complement C5 antibody; (41) the pathology of the eye is associated with uveitis and the therapeutic product is Angiotensin I Converting Enzyme (ACE); (42) the pathology of the eye is associated with uveitis and the therapeutic product is Interleukin 10 (IL10); (43) the pathology of the eye is associated with uveitis and the therapeutic product is an anti-TNF monoclonal antibody; (44) the pathology of the eye is associated with choroideremia and the therapeutic product is Rab Escort Protein 1 (CHM); (45) the pathology of the eye is associated with X-linked retinoschisis (XLRS) and the therapeutic product is Retinoschisin (RS1); (46) the pathology of the eye is associated with Bardet-Biedl syndrome 1 and the therapeutic product is Bardet-Biedl Syndrome 1 (BBS1); (47) the pathology of the eye is associated with Bardet-Biedl syndrome 2 and the therapeutic product is Bardet-Biedl Syndrome 2 (BBS2); (48) the pathology of the eye is associated with Bardet-Biedl syndrome 3 and the therapeutic product is ADP Ribosylation Factor Like GTPase 6 (ARL6) (also known as BBS3); (49) the pathology of the eye is associated with Bardet-Biedl syndrome 4 and the therapeutic product is Bardet-Biedl Syndrome 4 (BBS4); (50) the pathology of the eye is associated with Bardet-Biedl syndrome 5 and the therapeutic product is Bardet-Biedl Syndrome 5 (BBS5); (51) the pathology of the eye is associated with Bardet-Biedl syndrome 6 and the therapeutic product is McKusick-Kaufman Syndrome (MKKS), also known as BBS6; (52) the pathology of the eye is associated with Bardet-Biedl syndrome 7 and the therapeutic product is Bardet-Biedl Syndrome 7 (BBS7); (53) the pathology of the eye is associated with Bardet-Biedl syndrome 8 and the therapeutic product is Tetratricopeptide Repeat Domain 8 (TTC8), also known as BBS8; (54) the pathology of the eye is associated with Bardet-Biedl syndrome 9 and the therapeutic product is Bardet-Biedl Syndrome 9 (BBS9); (55) the pathology of the eye is associated with Bardet-Biedl syndrome 10 and the therapeutic product is Bardet-Biedl Syndrome 10 (BBS10); (56) the pathology of the eye is associated with Bardet-Biedl syndrome 11 and the therapeutic product is Tripartite Motif Containing 32 (TRIM32), also known as BBS11; (57) the pathology of the eye is associated with Bardet-Biedl syndrome 12 and the therapeutic product is Bardet-Biedl Syndrome 12 (BBS12); (58) the pathology of the eye is associated with Bardet-Biedl syndrome 13 and the therapeutic product is MKS Transition Zone Complex Subunit 1 (MKS1), also known as BBS13; (59) the pathology of the eye is associated with Bardet-Biedl syndrome 14 and the therapeutic product is Centrosomal Protein 290 (CEP290), also known as BBS14 and LCA10; (60) the pathology of the eye is associated with Bardet-Biedl syndrome 15 and the therapeutic product is WD Repeat Containing Planar Cell Polarity Effector (WDPCP), also known as BBS15; (61) the pathology of the eye is associated with Bardet-Biedl syndrome 16 and the therapeutic product is Serologically Defined Colon Cancer Antigen 8 (SDCCAG8), also known as BBS16; (62) the pathology of the eye is associated with Bardet-Biedl syndrome 17 and the therapeutic product is Leucine Zipper Transcription Factor Like 1 (LZTFL1), also known as BBS17; (63) the pathology of the eye is associated with Bardet-Biedl syndrome 18 and the therapeutic product is BBSome Interacting Protein 1 (BBIP1), also known as BBS18; (64) the pathology of the eye is associated with Bardet-Biedl syndrome 19 and the therapeutic product is Intraflagellar Transport 27 (IFT27), also known as BBS19; (65) the pathology of the eye is associated with cone dystrophy and the therapeutic product is Guanylate Cyclase Activator 1A (GUCA1A); (66) the pathology of the eye is associated with optic atrophy and the therapeutic product is OPA1 Mitochondrial Dynamin Like GTPase (OPA1); (67) the pathology of the eye is associated with retinitis pigmentosa 1 and the therapeutic product is RP1 Axonemal Microtubule Associated (RP1); (68) the pathology of the eye is associated with retinitis pigmentosa 2 and the therapeutic product is RP2 Activator of ARL3 GTPase (RP2); (69) the pathology of the eye is associated with retinitis pigmentosa 7 and the therapeutic product is Peripherin 2 (PRPH2); (70) the pathology of the eye is associated with retinitis pigmentosa 11 and the therapeutic product is Pre-mRNA Processing Factor 31(PRPF31); (71) the pathology of the eye is associated with retinitis pigmentosa 12 and the therapeutic product is Crumbs Cell Polarity Complex Component 1 (CRB1), also known as LCA8; (72) the pathology of the eye is associated with retinitis pigmentosa 13 and the therapeutic product is Pre-mRNA Processing Factor 8 (PRPF8); (73) the pathology of the eye is associated with retinitis pigmentosa 25 and the therapeutic product is Eyes Shut Homolog (EYS); (74) the pathology of the eye is associated with retinitis pigmentosa 28 and the therapeutic product is FAM161 Centrosomal Protein A (FAM161A); (75) the pathology of the eye is associated with retinitis pigmentosa 37 and the therapeutic product is Nuclear Receptor Subfamily 2 Group E Member 3 (NR2E3); (76) the pathology of the eye is associated with retinitis pigmentosa 38 and the therapeutic product is MER Proto-Oncogene, Tyrosine Kinase (MERTK); (77) the pathology of the eye is associated with retinitis pigmentosa 40 and the therapeutic product is Phosphodiesterase 6B (PDE6B); (78) the pathology of the eye is associated with retinitis pigmentosa 41 and the therapeutic product is Prominin 1 (PROM1); (79) the pathology of the eye is associated with retinitis pigmentosa 43 and the therapeutic product is Phosphodiesterase 6A (PDE6A); (80) the pathology of the eye is associated with retinitis pigmentosa 56 and the therapeutic product is Interphotoreceptor Matrix Proteoglycan 2 (IMPG2); (81) the pathology of the eye is associated with petinitis pigmentosa 62 and the therapeutic product is Male Germ Cell Associated Kinase (MAK); (82) the pathology of the eye is associated with retinitis pigmentosa 80 and the therapeutic product is Intraflagellar Transport 140 (IFT140); (83) the pathology of the eye is associated with dry AMD and the therapeutic product is an anti-complement monoclonal antibody or an anti-complement aptamer, wherein the anti-complement monoclonal antibody or an anti-complement aptamer is an anti-complement C1 monoclonal antibody or aptamer, an anti-complement C1q monoclonal antibody or aptamer, an anti-complement C1s monoclonal antibody or aptamer, an anti-complement C2 monoclonal antibody or aptamer, an anti-complement C2a monoclonal antibody or aptamer, an anti-complement C2b monoclonal antibody or aptamer, an anti-complement C3 monoclonal antibody or aptamer, an anti-complement C3a monoclonal antibody or aptamer, an anti-complement C3b monoclonal antibody or aptamer, an anti-complement C4 monoclonal antibody or aptamer, an anti-complement C4a monoclonal antibody or aptamer, an anti-complement C4b monoclonal antibody or aptamer, an anti-complement C5 monoclonal antibody or aptamer, an anti-complement C5a monoclonal antibody or aptamer, an anti-complement C5b monoclonal antibody or aptamer, an anti-complement C6 monoclonal antibody or aptamer, an anti-complement C7 monoclonal antibody or aptamer, an anti-complement C8 monoclonal antibody or aptamer, or an anti-complement C9 monoclonal antibody or aptamers, or preferably an anti-complement C5 antibody; (84) the pathology of the eye is associated with dry AMD and the therapeutic product is an anti-membrane attack complex (MAC) therapeutic product, preferably the anti-MAC therapeutic product is an anti-MAC monoclonal antibody, which is a monoclonal antibody against a human protein of the membrane attack complex, which is composed of four complement proteins C5b (SEQ ID NOs. 314-316), C6 (SEQ ID NO. 317), C7 (SEQ ID NO. 318), and C8 (SEQ ID NOs. 319-321); (85) the pathology of the eye is associated with dry AMD and the therapeutic product is HtrA Serine Peptidase 1 (HTRA1); (86) the pathology of the eye is associated with Best disease and the therapeutic product is Bestrophin 1 (BEST1); (87) the pathology of the eye is associated with dry AMD and the therapeutic product is a complement factor B antisense oligonucleotide; (88) the pathology of the eye is associated with dry AMD and the therapeutic product is an anti-beta-amyloid monoclonal antibody; (89) the pathology of the eye is associated with dry AMD and the therapeutic product is CD59 glycoprotein (CD59); (90) the pathology of the eye is associated with dry AMD and the therapeutic product is Channelrhodopsin-1 (ChR1), which includes the human homolog of ChR1; (91) the pathology of the eye is associated with dry AMD and the therapeutic product is Channelrhodopsin-2 (ChR2), which includes the human homolog of ChR2; (92) the pathology of the eye is associated with dry AMD and the therapeutic product is an anti-complement monoclonal antibody or an anti-complement aptamer, wherein the anti-complement monoclonal antibody or an anti-complement aptamer is an anti-complement C1 monoclonal antibody or aptamer, an anti-complement C1q monoclonal antibody or aptamer, an anti-complement C1s monoclonal antibody or aptamer, an anti-complement C2 monoclonal antibody or aptamer, an anti-complement C2a monoclonal antibody or aptamer, an anti-complement C2b monoclonal antibody or aptamer, an anti-complement C3 monoclonal antibody or aptamer, an anti-complement C3a monoclonal antibody or aptamer, an anti-complement C3b monoclonal antibody or aptamer, an anti-complement C4 monoclonal antibody or aptamer, an anti-complement C4a monoclonal antibody or aptamer, an anti-complement C4b monoclonal antibody or aptamer, an anti-complement C5 monoclonal antibody or aptamer, an anti-complement C5a monoclonal antibody or aptamer, an anti-complement C5b monoclonal antibody or aptamer, an anti-complement C6 monoclonal antibody or aptamer, an anti-complement C7 monoclonal antibody or aptamer, an anti-complement C8 monoclonal antibody or aptamer, or an anti-complement C9 monoclonal antibody or aptamers, or preferably an anti-complement C5 antibody; (93) the pathology of the eye is associated with dry AMD and the therapeutic product is anti-complement factor D therapeutic product, including but not limited to an anti-complement factor D monoclonal antibody, or an anti-complement factor D aptamer; (94) the pathology of the eye is associated with age-related retinal ganglion cell (RGC) degeneration and the therapeutic product is DnaJ heat shock protein family (Hsp40) member C3 (DNAJC3), also known as P58IPK; (95) the pathology of the eye is associated with blue cone monochromacy (BCM) and the therapeutic product is L opsin (OPN1LW); (96) the pathology of the eye is associated with glaucoma and the therapeutic product is beta-2 adrenoceptor siRNA; (97) the pathology of the eye is associated with glaucoma and the therapeutic product is Caspase-2 (CASP2); (98) the pathology of the eye is associated with glaucoma and the therapeutic product is Insulin Receptor Substrate 1 (IRS1); (99) the pathology of the eye is associated with glaucoma and the therapeutic product is HIF-1 Responsive Protein RTP801 (RTP801); (100) the pathology of the eye is associated with glaucoma and the therapeutic product is Transforming Growth Factor Beta 2 (TGFB2); (101) the pathology of the eye is associated with glaucoma and the therapeutic product is Brain Derived Neurotrophic Factor (BDNF); (102) the pathology of the eye is associated with glaucoma and the therapeutic product is Ciliary Neurotrophic Factor (CNTF); (103) the pathology of the eye is associated with glaucoma and the therapeutic product is Prostaglandin-Endoperoxide Synthase 2 (PTGS2); (104) the pathology of the eye is associated with glaucoma and the therapeutic product is Prostaglandin F Receptor (PTGFR) (when the pathology of the eye is associated with glaucoma, in a specific embodiment, a recombinant viral vector comprising a nucleotide sequence encoding PTGFR can be administered to the human subject in combination with a recombinant viral vector comprising a nucleotide sequence encoding PTGS2; in another specific embodiment, a recombinant viral vector comprising a nucleotide sequence encoding PTGFR and a nucleotide sequence encoding PTGS2 can be administered to the human subject); (105) the pathology of the eye is associated with glaucoma and the therapeutic product is a hyaluronidase, e.g. HYAL1, HYAL2, HYAL3, HYAL4, and HYAL5; (106) the pathology of the eye is associated with glaucoma and the therapeutic product is Pigment Epithelium-Derived Factor (PEDF); (107) the pathology of the eye is associated with glaucoma and the therapeutic product is Vascular Endothelial Growth Factor (VEGF); (108) the pathology of the eye is associated with glaucoma and the therapeutic product is Placental Growth Factor (PGF), wherein PGF can be used in combo with VEGF; (109) the pathology of the eye is associated with glaucoma (e.g., a congenital glaucoma or juvenile glaucoma) and the therapeutic product is Myocilin (MYOC); (110) the pathology of the eye is associated with NMO and the therapeutic product is an anti-complement C5 monoclonal antibody; (111) the pathology of the eye is associated with NMO and the therapeutic product is C-C Motif Chemokine Receptor 5 (CCR5) siRNA, CCR5 shRNA, siRNA or CCR5 miRNA (preferably, a CCR5 miRNA); (112) the pathology of the eye is associated with NMO and the therapeutic product is an anti-CD19 monoclonal antibody; (113) the pathology of the eye is associated with retinitis pigmentosa that is associated with rhodopsin mutations and the therapeutic product is Channelrhodopsin-1 (ChR1), which includes the human homolog of ChR1; (114) the pathology of the eye is associated with retinitis pigmentosa that is associated with rhodopsin mutations and the therapeutic product is Channelrhodopsin-2 (ChR2), which includes the human homolog of ChR2; (115) the pathology of the eye is associated with retinitis pigmentosa and the therapeutic product is Ciliary Neurotrophic Factor (CNTF); (116) the pathology of the eye is associated with autosomal recessive retinitis pigmentosa and the therapeutic product is Crumbs Cell Polarity Complex Component 1 (CRB1); (117) the pathology of the eye is associated with autosomal recessive retinitis pigmentosa and the therapeutic product is Crumbs Cell Polarity Complex Component 2 (CRB2); (118) the pathology of the eye is associated with retinitis pigmentosa and the therapeutic product is Histone Deacetylase 4 (HDAC4); (119) the pathology of the eye is associated with retinitis pigmentosa and the therapeutic product is Rhodopsin (RHO); (120) the pathology of the eye is associated with retinitis pigmentosa and the therapeutic product is Nerve Growth Factor (NGF); (121) the pathology of the eye is associated with retinitis pigmentosa and the therapeutic product is Nuclear Factor, Erythroid 2 Like 2 (NRF2); (122) the pathology of the eye is associated with retinitis pigmentosa and the therapeutic product is Pigment Epithelium-Derived Factor (PEDF); (123) the pathology of the eye is associated with retinitis pigmentosa and the therapeutic product is Glutathione S-Transferase PI 1 (GSTP1), also known as PI; (124) the pathology of the eye is associated with retinitis pigmentosa and the therapeutic product is Rod-Derived Cone Viability Factor (RDCVF); (125) the pathology of the eye is associated with retinitis pigmentosa and the therapeutic product is Rhodopsin (RHO); (126) the pathology of the eye is associated with retinitis pigmentosa and the therapeutic product is Retinaldehyde Binding Protein 1 (RLBP1); (127) the pathology of the eye is associated with Stargardt's disease and the therapeutic product is an anti-complement C5 aptamer; (128) the pathology of the eye is associated with uveitis and the therapeutic product is Double Homeobox 4 (DUX4); (129) the pathology of the eye is associated with uveitis and the therapeutic product is NLR Family Pyrin Domain Containing 3 (NLRP3); (130) the pathology of the eye is associated with uveitis and the therapeutic product is Spleen Associated Tyrosine Kinase (SYK); (131) the pathology of the eye is associated with uveitis and the therapeutic product is Adrenocorticotropic Hormone (ACTH); (132) the pathology of the eye is associated with uveitis and the therapeutic product is Caspase 1 (CASP1); (133) the pathology of the eye is associated with uveitis and the therapeutic product is anti-CD59 therapeutic product (such as an anti-CD59 therapeutic protein (for example, an anti-CD59 monoclonal antibody), or an anti-CD59 therapeutic RNA (for example, an anti-CD59 shRNA, anti-CD59 siRNA, or anti-CD59 miRNA), preferably an anti-CD59 monoclonal antibody); (134) the pathology of the eye is associated with uveitis and the therapeutic product is an anti-complement monoclonal antibody or an anti-complement aptamer, wherein the anti-complement monoclonal antibody or aptamer is an anti-complement C1 monoclonal antibody or aptamer, an anti-complement C1q monoclonal antibody or aptamer, an anti-complement C1s monoclonal antibody or aptamer, an anti-complement C2 monoclonal antibody or aptamer, an anti-complement C2a monoclonal antibody or aptamer, an anti-complement C2b monoclonal antibody or aptamer, an anti-complement C3 monoclonal antibody or aptamer, an anti-complement C3a monoclonal antibody or aptamer, an anti-complement C3b monoclonal antibody or aptamer, an anti-complement C4 monoclonal antibody or aptamer, an anti-complement C4a monoclonal antibody or aptamer, an anti-complement C4b monoclonal antibody or aptamer, an anti-complement C5 monoclonal antibody or aptamer, an anti-complement C5a monoclonal antibody or aptamer, an anti-complement C5b monoclonal antibody or aptamer, an anti-complement C6 monoclonal antibody or aptamer, an anti-complement C7 monoclonal antibody or aptamer, an anti-complement C8 monoclonal antibody or aptamer, or an anti-complement C9 monoclonal antibody or aptamers, or preferably an anti-complement C5 antibody; (135) the pathology of the eye is associated with corneal neovascularization and the therapeutic product is Insulin Receptor Substrate 1 (IRS1); (136) the pathology of the eye is associated with corneal neovascularization and the therapeutic product is NOTCH Regulated Ankyrin Repeat Protein (NRARP); (137) the pathology of the eye is associated with diabetic retinopathy and the therapeutic product is NOTCH Regulated Ankyrin Repeat Protein (NRARP); (138) the pathology of the eye is associated with diabetic retinopathy and the therapeutic product is Alpha-2-Antiplasmin (A2AP); (139) the pathology of the eye is associated with diabetic retinopathy and the therapeutic product is Plasminogen (PLG); (140) the pathology of the eye is associated with diabetic retinopathy and the therapeutic product can be a growth hormone; (141) the pathology of the eye is associated with diabetic retinopathy and the therapeutic product is Insulin Like Growth Factor 1 (IGF1), wherein IGF1 can be used in combo with growth hormone; (142) the pathology of the eye is associated with diabetic retinopathy and the therapeutic product is Interleukin 1 Beta (IL1B). (143) the pathology of the eye is associated with diabetic retinopathy and the therapeutic product is Angiotensin I Converting Enzyme 2 (ACE2), wherein ACE2 can be used in combo with IL1B; (144) the pathology of the eye is associated with diabetic retinopathy and the therapeutic product is IRS1; (145) the pathology of the eye is associated with diabetic retinopathy and the therapeutic product is an anti-integrin oligopeptide; (146) the pathology of the eye is associated with diabetic retinopathy and the therapeutic product is an anti-Placental Growth Factor (PGF) monoclonal antibody; (147) the pathology of the eye is associated with Graves' ophthalmopathy (also known as Graves' orbitopathy) and the therapeutic product is an anti-CD40 monoclonal antibody; (148) the pathology of the eye is associated with Graves' ophthalmopathy and the therapeutic product is an anti-Insulin-Like Growth Factor 1 Receptor (IGF1R) monoclonal antibody; (149) the pathology of the eye is associated with Graves' ophthalmopathy and the therapeutic product is an anti-Insulin-Like Growth Factor 2 Receptor (IGF2R) monoclonal antibody; (150) the pathology of the eye is associated with DME and the therapeutic product is an anti-integrin oligopeptide; (151) the pathology of the eye is associated with DME and the therapeutic product is an anti-Placental Growth Factor (PGF) monoclonal antibody; (152) the pathology of the eye is associated with DME and the therapeutic product is RTP801 siRNA; (153) the pathology of the eye is associated with multiple sclerosis (MS)-associated vision loss and the therapeutic product is ND1; (154) the pathology of the eye is associated with myopia and the therapeutic product is Matrix Metalloproteinase 2 (MMP2) RNAi; (155) the pathology of the eye is associated with X-linked recessive ocular albinism and the therapeutic product is G-Protein Coupled Receptor 143 (GPR143); (156) the pathology of the eye is associated with oculocutaneous albinism type 1 and the therapeutic product is Tyrosinase (TYR); (157) the pathology of the eye is associated with optic neuritis and the therapeutic product is Caspase 2 (CASP2); (158) the pathology of the eye is associated with optic neuritis and the therapeutic product is an anti-Leucine Rich Repeat And Ig Domain Containing Protein 1 (LINGO1) monoclonal antibody; or (159) the pathology of the eye is associated with polypoidal choroidal vasculopathy and the therapeutic product is anti-complement monoclonal antibody or an anti-complement aptamer, wherein the anti-complement monoclonal antibody or aptamer is an anti-complement C1 monoclonal antibody or aptamer, an anti-complement C1q monoclonal antibody/aptamer, an anti-complement C1s monoclonal antibody/aptamer, an anti-complement C2 monoclonal antibody/aptamer, an anti-complement C2a monoclonal antibody or aptamer, an anti-complement C2b monoclonal antibody or aptamer, an anti-complement C3 monoclonal antibody or aptamer, an anti-complement C3a monoclonal antibody or aptamer, an anti-complement C3b monoclonal antibody or aptamer, an anti-complement C4 monoclonal antibody or aptamer, an anti-complement C4a monoclonal antibody or aptamer, an anti-complement C4b monoclonal antibody or aptamer, an anti-complement C5 monoclonal antibody or aptamer, an anti-complement C5a monoclonal antibody or aptamer, an anti-complement C5b monoclonal antibody or aptamer, an anti-complement C6 monoclonal antibody or aptamer, an anti-complement C7 monoclonal antibody or aptamer, an anti-complement C8 monoclonal antibody or aptamer, or an anti-complement C9 monoclonal antibody or aptamers, or preferably an anti-complement C5 antibody.

[0027] In certain embodiments of the methods described herein, the pathology of the eye is associated with X-linked retinitis pigmentosa (XLRP) and the therapeutic product is Retinitis Pigmentosa GTPase Regulator (RPGR). In certain embodiments of any of the foregoing methods, the pathology of the eye is associated with achromatopsia (ACHM) and the therapeutic product is Cyclic Nucleotide Gated Channel Beta 3 (CNGB3). In certain embodiments of any of the foregoing methods, the pathology of the eye is associated with achromatopsia (for example, a CNGA3-linked achromatopsia) and the therapeutic product is Cyclic Nucleotide Gated Channel Alpha 3 (CNGA3). In certain embodiments of any of the foregoing methods, the pathology of the eye is associated with biallelic RPE65 mutation-associated retinal dystrophy and the therapeutic product is Retinoid Isomerohydrolase RPE65 (RPE65).

[0028] In certain embodiments of the methods described herein, the pathology of the eye is associated with (1) Batten-CLN1 and the therapeutic product is Palmitoyl-Protein Thioesterase 1 (PPT1); (2) Batten-CLN2 and the therapeutic product is Tripeptidyl-Peptidase 1 (TPP1); (3) Batten-CLN3 and the therapeutic product is Battenin (CLN3); (4) uveitis and the therapeutic product is an anti-Interleukin 6 (IL6) monoclonal antibody; (5) uveitis and the therapeutic product is an anti-TNF-alpha (TNF) monoclonal antibody; (6) diabetic macular edema (DME) and the therapeutic product is an anti-IL6 monoclonal antibody; (7) red-green color blindness and the therapeutic product is L opsin (OPN1LW); (8) red-green color blindness and the therapeutic product is M opsin (OPN1MW); (9) blue cone monochromacy and the therapeutic product is M opsin (OPN1MW); (10) Leber congenital amaurosis-1 (LCA 1) and the therapeutic product is Guanylate Cyclase 2D, Retinal (GUCY2D); (11) Leber congenital amaurosis-2 (LCA 2) and the therapeutic product is Retinoid Isomerohydrolase RPE65 (RPE65); (12) Leber congenital amaurosis-7 (LCA 7) and the therapeutic product is Cone-Rod Homeobox (CRX); (13) Leber congenital amaurosis-11 (LCA 11) and the therapeutic product is Inosine Monophosphate Dehydrogenase 1 (IMPDH1); (14) Leber congenital amaurosis-12 (LCA 12) and the therapeutic product is Retinal Degeneration 3, GUCY2D regulator (RD3); (15) Leber congenital amaurosis-13 (LCA 13) and the therapeutic product is Retinol Dehydrogenase 12 (RDH12); (16) Leber congenital amaurosis-15 (LCA 15) and the therapeutic product is Tubby Like Protein 1 (TULP1); (17) Leber congenital amaurosis-16 (LCA 16) and the therapeutic product is Potassium Voltage-Gated Channel Subfamily J Member 13 (KCNJ13); (18) Leber's hereditary optic neuropathy (LHON) and the therapeutic product is Mitochondrially Encoded NADH Dehydrogenase 1 (MT-ND1); (19) LHON and the therapeutic product is Mitochondrially Encoded NADH Dehydrogenase 4 (MT-ND4); (20) LHON and the therapeutic product is Mitochondrially Encoded NADH Dehydrogenase 6 (MT-ND6); (21) neuromyelitis optica (NMO) and the therapeutic product is an anti-complement monoclonal antibody or an anti-complement aptamer, wherein the anti-complement monoclonal antibody or aptamer is an anti-complement C1 monoclonal antibody or aptamer, an anti-complement C1q monoclonal antibody or aptamer, an anti-complement C1s monoclonal antibody or aptamer, an anti-complement C2 monoclonal antibody or aptamer, an anti-complement C2a monoclonal antibody or aptamer, an anti-complement C2b monoclonal antibody or aptamer, an anti-complement C3 monoclonal antibody or aptamer, an anti-complement C3a monoclonal antibody or aptamer, an anti-complement C3b monoclonal antibody or aptamer, an anti-complement C4 monoclonal antibody or aptamer, an anti-complement C4a monoclonal antibody or aptamer, an anti-complement C4b monoclonal antibody or aptamer, an anti-complement C5 monoclonal antibody or aptamer, an anti-complement C5a monoclonal antibody or aptamer, an anti-complement C5b monoclonal antibody or aptamer, an anti-complement C6 monoclonal antibody or aptamer, an anti-complement C7 monoclonal antibody or aptamer, an anti-complement C8 monoclonal antibody or aptamer, or an anti-complement C9 monoclonal antibody or aptamers, or preferably an anti-complement C5 antibody; (22) NMO and the therapeutic product is an anti-IL6 monoclonal antibody; (23) uveitis and the therapeutic product is an anti-complement C5 monoclonal antibody; (24) uveitis and the therapeutic product is Angiotensin I Converting Enzyme (ACE); (25) uveitis and the therapeutic product is Interleukin 10 (IL10); (26) uveitis and the therapeutic product is an anti-TNF monoclonal antibody; (27) X-linked retinoschisis (XLRS) and the therapeutic product is Retinoschisin (RS1); (28) Bardet-Biedl syndrome 1 and the therapeutic product is Bardet-Biedl Syndrome 1 (BBS1); (29) Bardet-Biedl syndrome 3 and the therapeutic product is ADP Ribosylation Factor Like GTPase 6 (ARL6); (30) Bardet-Biedl syndrome 5 and the therapeutic product is Bardet-Biedl Syndrome 5 (BBS5); (31) Bardet-Biedl syndrome 6 and the therapeutic product is McKusick-Kaufman Syndrome (MKKS); (32) Bardet-Biedl syndrome 10 and the therapeutic product is Bardet-Biedl Syndrome 10 (BBS10); (33) Bardet-Biedl syndrome 11 and the therapeutic product is Tripartite Motif Containing 32 (TRIM32); (34) Bardet-Biedl syndrome 13 and the therapeutic product is MKS Transition Zone Complex Subunit 1 (MKS1); (35) Bardet-Biedl syndrome 18 and the therapeutic product is BBSome Interacting Protein 1 (BBIP1); (36) Bardet-Biedl syndrome 19 and the therapeutic product is Intraflagellar Transport 27 (IFT27); (37) cone dystrophy and the therapeutic product is Guanylate Cyclase Activator 1A (GUCA1A); (38) retinitis pigmentosa 13 and the therapeutic product is Pre-mRNA Processing Factor 8 (PRPF8); (39) retinitis pigmentosa 37 and the therapeutic product is Nuclear Receptor Subfamily 2 Group E Member 3 (NR2E3); or (40) Best disease and the therapeutic product is Bestrophin 1 (BEST1).

[0029] In certain embodiments of the methods described herein, the pathology of the eye is associated with biallelic RPE65 mutation-associated retinal dystrophy and the therapeutic product is Retinoid Isomerohydrolase RPE65 (RPE65).

[0030] In certain embodiments of the methods described herein, the pathology of the eye is associated with (1) Batten-CLN2 and the therapeutic product is Tripeptidyl-Peptidase 1 (TPP1); (2) Usher's-Type 1 and the therapeutic product is Myosin VIIA (MYO7A); (3) Usher's-Type 1 and the therapeutic product is Cadherin Related 23 (CDH23); (4) Usher's-Type 2 and the therapeutic product is Protocadherin Related 15 (PCDH15); (5) Usher's-Type 2 and the therapeutic product is Usherin (USH2A); (6) Usher's-Type 3 and the therapeutic product is Clarin 1 (CLRN1); (7) Stargardt's and the therapeutic product is ATP Binding Cassette Subfamily A Member 4 (ABCA4); (8) Stargardt's and the therapeutic product is ELOVL Fatty Acid Elongase 4 (ELOVL4); (9) red-green color blindness and the therapeutic product is L opsin (OPN1LW); (10) red-green color blindness and the therapeutic product is M opsin (OPN1MW); (11) blue cone monochromacy and the therapeutic product is M opsin (OPN1MW); (12) Leber congenital amaurosis-1 (LCA 1) and the therapeutic product is Guanylate Cyclase 2D, Retinal (GUCY2D); (13) Leber congenital amaurosis-2 (LCA 2) and the therapeutic product is Retinoid Isomerohydrolase RPE65 (RPE65); (14) Leber congenital amaurosis-4 (LCA 4) and the therapeutic product is Aryl Hydrocarbon Receptor Interacting Protein Like 1 (AIPL1); (15) Leber congenital amaurosis-7 (LCA 7) and the therapeutic product is Cone-Rod Homeobox (CRX); (16) Leber congenital amaurosis-8 (LCA 8) and the therapeutic product is Crumbs Cell Polarity Complex Component 1 (CRB1); (17) Leber congenital amaurosis-9 (LCA 9) and the therapeutic product is Nicotinamide Nucleotide Adenylyltransferase 1 (NMNAT1); (18) Leber congenital amaurosis-10 (LCA 10) and the therapeutic product is Centrosomal Protein 290 (CEP290); (19) Leber congenital amaurosis-11 (LCA 11) and the therapeutic product is Inosine Monophosphate Dehydrogenase 1 (IMPDH1); (20) Leber congenital amaurosis-15 (LCA 15) and the therapeutic product is Tubby Like Protein 1 (TULP1); (21) LHON and the therapeutic product is Mitochondrially Encoded NADH Dehydrogenase 4 (MT-ND4); (22) LHON and the therapeutic product is Mitochondrially Encoded NADH Dehydrogenase 6 (MT-ND6); (23) choroideremia and the therapeutic product is Rab Escort Protein 1 (CHM); (24) X-linked retinoschisis (XLRS) and the therapeutic product is Retinoschisin (RS1); (25) Bardet-Biedl syndrome 1 and the therapeutic product is Bardet-Biedl Syndrome 1 (BBS1); (26) Bardet-Biedl syndrome 6 and the therapeutic product is McKusick-Kaufman Syndrome (MKKS); (27) Bardet-Biedl syndrome 10 and the therapeutic product is Bardet-Biedl Syndrome 10 (BBS10); (28) cone dystrophy and the therapeutic product is Guanylate Cyclase Activator 1A (GUCA1A); (29) optic atrophy and the therapeutic product is OPA1 Mitochondrial Dynamin Like GTPase (OPA1); (30) retinitis pigmentosa 1 and the therapeutic product is RP1 Axonemal Microtubule Associated (RP1); (31) retinitis pigmentosa 2 and the therapeutic product is RP2 Activator of ARL3 GTPase (RP2); (32) retinitis pigmentosa 7 and the therapeutic product is Peripherin 2 (PRPH2); (33) retinitis pigmentosa 11 and the therapeutic product is Pre-mRNA Processing Factor 31(PRPF31); (34) retinitis pigmentosa 13 and the therapeutic product is Pre-mRNA Processing Factor 8 (PRPF8); (35) retinitis pigmentosa 37 and the therapeutic product is Nuclear Receptor Subfamily 2 Group E Member 3 (NR2E3); (36) retinitis pigmentosa 38 and the therapeutic product is MER Proto-Oncogene, Tyrosine Kinase (MERTK); (37) retinitis pigmentosa 40 and the therapeutic product is Phosphodiesterase 6B (PDE6B); (38) retinitis pigmentosa 41 and the therapeutic product is Prominin 1 (PROM1); (39) retinitis pigmentosa 56 and the therapeutic product is Interphotoreceptor Matrix Proteoglycan 2 (IMPG2); (40) petinitis pigmentosa 62 and the therapeutic product is Male Germ Cell Associated Kinase (MAK); (41) retinitis pigmentosa 80 and the therapeutic product is Intraflagellar Transport 140 (IFT140); or (42) Best disease and the therapeutic product is Bestrophin 1 (BEST1).

[0031] In certain embodiments of the methods described herein, the pathology of the eye is associated with X-linked retinitis pigmentosa (XLRP) and the therapeutic product is Retinitis Pigmentosa GTPase Regulator (RPGR). In certain embodiments of any of the foregoing methods, the pathology of the eye is associated with achromatopsia and the therapeutic product is Cyclic Nucleotide Gated Channel Beta 3 (CNGB3); or achromatopsia (for example, a CNGA3-linked achromatopsia) and the therapeutic product is Cyclic Nucleotide Gated Channel Alpha 3 (CNGA3).

[0032] In certain embodiments of the method described herein, the recombinant viral vector further comprises a nucleotide sequence encoding a promoter or an enhancer-promoter, which nucleotide sequence encoding the promoter or enhancer-promoter is operably linked to the nucleotide sequence encoding the therapeutic product, and wherein the promoter or enhancer-promoter is a ubiquitous promoter/enhancer-promoter, eye-specific promoter/enhancer-promoter, or retina-specific promoter/enhancer-promoter.

[0033] In certain embodiments of the methods described herein, the recombinant viral vector further comprises a nucleotide sequence encoding a promoter or an enhancer-promoter, which nucleotide sequence encoding the promoter or enhancer-promoter is operably linked to the nucleotide sequence encoding the therapeutic product, and wherein the promoter or enhancer-promoter is: (1) a CAG promoter; (2) a CBA promoter; (3) a CMV promoter; (4) a 1.7-kb red cone opsin promoter (PR1.7 promoter); (5) a Rhodopsin Kinase (GRK1) photoreceptor-specific enhancer-promoter (see, e.g., Young et al., 2003, Retinal Cell Biology; 44:4076-4085); (6) an hCARp promoter, which is a human cone arrestin promoter; (7) an hRKp, which is a rhodopsin kinase promoter; (8) a cone photoreceptor specific human arrestin 3 (ARR3) promoter; (9) a rhodopsin promoter; or (10) a U6 promoter (in particular when the therapeutic product is a small RNA such as shRNA and siRNA).

[0034] In certain embodiments of the methods described herein, the recombinant viral vector further comprises a nucleotide sequence encoding a cone-specific promoter, which nucleotide sequence encoding the cone-specific promoter is operably linked to the nucleotide sequence encoding the therapeutic product, and wherein: (1) the pathology of the eye is associated with red-green color blindness and the therapeutic product is L opsin (OPN1LW); (2) the pathology of the eye is associated with red-green color blindness and the therapeutic product is M opsin (OPN1MW); (3) the pathology of the eye is associated with blue cone monochromacy and the therapeutic product is M opsin (OPN1MW); (4) the pathology of the eye is associated with cone dystrophy and the therapeutic product is Guanylate Cyclase Activator 1A (GUCA1A); or (5) the pathology of the eye is associated with blue cone monochromacy (BCM) and the therapeutic product is L opsin (OPN1LW).

[0035] In certain embodiments of the methods described herein, the administering step delivers a therapeutically effective amount of the therapeutic product to the retina of said human subject.

[0036] In certain embodiments of the methods described herein, the therapeutically effective amount of the therapeutic product is produced by human retinal cells of said human subject.

[0037] In certain embodiments of the methods described herein, the therapeutically effective amount of the therapeutic product is produced by human photoreceptor cells, horizontal cells, bipolar cells, amacrine cells, retina ganglion cells, and/or retinal pigment epithelial cells in the external limiting membrane of said human subject.

[0038] In certain embodiments of the methods described herein, the human photoreceptor cells are cone cells and/or rod cells.

[0039] In certain embodiments of the methods described herein, the retina ganglion cells are midget cells, parasol cells, bistratified cells, giant retina ganglion cells, photosensitive ganglion cells, and/or Müller glia.

[0040] In certain embodiments of the methods described herein, the recombinant viral vector is an rAAV vector (e.g., an rAAV8, rAAV2, rAAV2tYF, or rAAV5 vector).

[0041] In certain embodiments of the methods described herein, wherein the recombinant viral vector is an rAAV8 vector.

[0042] In certain embodiments of the methods described herein, the method further comprises, after the administering step, a step of monitoring temperature of the surface of the eye using an infrared thermal camera. In a specific embodiment, the infrared thermal camera is an FLIR T530 infrared thermal camera. In a specific embodiment, the infrared thermal camera is an FLIR T420 infrared thermal camera. In a specific embodiment, the infrared thermal camera is an FLIR T440 infrared thermal camera. In a specific embodiment, the infrared thermal camera is an Fluke Ti400 infrared thermal camera. In a specific embodiment, the infrared thermal camera is an FLIRE60 infrared thermal camera. In a specific embodiment, the infrared resolution of the infrared thermal camera is equal to or greater than 75,000 pixels. In a specific embodiment, the thermal sensitivity of the infrared thermal camera is equal to or smaller than 0.05° C. at 30° C. In a specific embodiment, the field of view (FOV) of the infrared thermal camera is equal to or lower than 25°×25°.

[0043] In certain embodiments of the methods described herein, delivering to the eye comprises delivering to the retina, choroid, and/or vitreous humor of the eye.

[0044] In certain embodiments, the recombinant vector used for delivering the therapeutic product should have a tropism for cells of the eye, for example, human retinal cells, (e.g., photoreceptor cells). Such vectors can include non-replicating recombinant adeno-associated virus vectors (“rAAV”), particularly those bearing an AAV8 capsid are preferred. However, other recombinant viral vectors may be used, including but not limited to recombinant lentiviral vectors, vaccinia viral vectors, or non-viral expression vectors referred to as “naked DNA” constructs. Preferably, the expression of therapeutic product should be controlled by appropriate expression control elements, for example, (1) a CAG promoter; (2) a CBA promoter; (3) a CMV promoter; (4) PR1.7 promoter; (5) a Rhodopsin Kinase (GRK1) photoreceptor-specific enhancer-promoter (6) an hCARp promoter; (7) an hRKp; (8) a cone photoreceptor specific human arrestin 3 (ARR3) promoter; (9) a rhodopsin promoter; or (10) a U6 promoter, and can include other expression control elements that enhance expression of the therapeutic product driven by the vector (e.g., introns such as the chicken β-actin intron, minute virus of mice (MVM) intron, human factor IX intron (e.g., FIX truncated intron 1), β-globin splice donor/immunoglobulin heavy chain spice acceptor intron, adenovirus splice donor/immunoglobulin splice acceptor intron, SV40 late splice donor/splice acceptor (19S/16S) intron, and hybrid adenovirus splice donor/IgG splice acceptor intron and polyA signals such as the rabbit β-globin polyA signal, human growth hormone (hGH) polyA signal, SV40 late polyA signal, synthetic polyA (SPA) signal, and bovine growth hormone (bGH) polyA signal). See, e.g., Powell and Rivera-Soto, 2015, Discov. Med., 19(102):49-57.

[0045] In certain embodiments of the method described herein, therapeutically effective doses of the recombinant vector are administered (1) to the subretinal space without vitrectomy (e.g., via the suprachoroidal space or via peripheral injection), (2) to the suprachoroidal space, (3) to the outer space of the sclera (i.e., juxtascleral administration), (4) to the subretinal space via vitrectomy, or (5) to the vitreous cavity, in a volume ranging from 50-100 μl or 100-500 μl, preferably 100-300 μl, and most preferably, 250 μl, depending on the administration method. In certain embodiments, therapeutically effective doses of the recombinant vector are administered suprachoroidally in a volume of 100 μl or less, for example, in a volume of 50-100 μl. In certain embodiments, therapeutically effective doses of the recombinant vector are administered to the outer surface of the sclera (e.g., by a posterior juxtascleral depot procedure) in a volume of 500 μl or less, for example, in a volume of 10-20 μl, 20-50 μl, 50-100 μl, 100-200 μl, 200-300 μl, 300-400 μl, or 400-500 μl. In certain embodiments, therapeutically effective doses of the recombinant vector are administered to the subretinal space via peripheral injection, in a volume ranging from 50-100 μl or 100-500 μl, preferably 100-300 μl, and most preferably, 250 μl.

[0046] In certain embodiments, OptoKinetic Nystagmus (OKN) is assessed to measure visual acuity in patients. In certain embodiments, OKN can be performed using the methods and/or devices described and disclosed for example, in Cetinkaya et al., 2008, Eye, 22:77-81; Hyon et al., 2010, IOVS, 51(2): 752-757, Han et al., 2011, IOVS, 52(10): 7492-7497; Wester et al., 2007, IOVS, 48(10):4542-4548; Palmowski-Wolfe et al., 2019, J. AAPOS, 23(4): e49; Turuwhenua et al., Objective Assessment of Visual Performance Using Optokinetic Nystagmus in Young Children, October 2016, <anzctr.org.au/AnzctrAttachments/371914-OKN %20protocol.pdf; and Objective Acuity and Aier Eye Hospital Group Announce Strategic Cooperation Agreement, Cision PR Newswire, Jul. 25, 2019, retrieved from the Internet <prnewswire.com/news-releases/objective-acuity-and-aier-eye-hospital-group-announce-a-strategic-cooperation-agreement-300891165.html>, each of which is incorporated by reference in its entirety.

[0047] Without being bound by theory, this visual acuity screening uses the principles of the OKN involuntary reflex to objectively assess whether a patient's eyes can follow a moving target. By using OKN, no verbal communication is needed between the tester and the patient. As such, OKN can be used to measure visual acuity in pre-verbal and/or non-verbal patients. In certain embodiments, OKN is used to measure visual acuity in patients that are 1 month old, 2 months old, 3 months old, 4 months old, 5 months old, 6 months old, 7 months old, 8 months old, 9 months old, 10 months old, 11 months old, 1 year old, 1.5 years old, 2 years old, 2.5 years old, 3 years old, 3.5 years old, 4 years old, 4.5 years old, or 5 years old. In certain embodiments, an iPad is used to measure visual acuity through detection of the OKN reflex when a patient is looking at movement on the iPad.

[0048] Without being bound by theory, this visual acuity screening uses the principles of the OKN involuntary reflex to objectively assess whether a patient's eyes can follow a moving target. By using OKN, no verbal communication is needed between the tester and the patient. As such, OKN can be used to measure visual acuity in pre-verbal and/or non-verbal patients. In certain embodiments, OKN is used to measure visual acuity in patients that are less than 1.5 months old, 2 months old, 3 months old, 4 months old, 5 months old, 6 months old, 7 months old, 8 months old, 9 months old, 10 months old, 11 months old, 1 year old, 1.5 years old, 2 years old, 2.5 years old, 3 years old, 3.5 years old, 4 years old, 4.5 years old, or 5 years old. In another specific embodiment, OKN is used to measure visual acuity in patients that are 1-2 months old, 2-3 months old, 3-4 months old, 4-5 months old, 5-6 months old, 6-7 months old, 7-8 months old, 8-9 months old, 9-10 months old, 10-11 months old, 11 months to 1 year old, 1-1.5 years old, 1.5-2 years old, 2-2.5 years old, 2.5-3 years old, 3-3.5 years old, 3.5-4 years old, 4-4.5 years old, or 4.5-5 years old. In another specific embodiment, OKN is used to measure visual acuity in patients that are 6 months to 5 years old. In certain embodiments, an iPad is used to measure visual acuity through detection of the OKN reflex when a patient is looking at movement on the iPad.

[0049] In certain embodiments, visual acuity is assessed in a patient presenting with Batten-CLN2-associated vision loss by measuring OKN before the patient has been treated with an AAV, preferably AAV8 or AAV9, encoding Tripeptidyl-Peptidase 1(TPP1). Specifically, the patient presenting with Batten-CLN2-associated vision loss is at the age, and/or within the age range described above. In certain embodiments, visual acuity assessed in a patient up to 5 years old presenting with Batten-CLN2-associated vision loss by measuring OKN after the patient has been treated with an AAV, preferably AAV8 or AAV9, encoding Tripeptidyl-Peptidase 1. In certain embodiments, a visual acuity assessment based on OKN determines that visual acuity does not decrease after treatment with AAV gene therapy. In certain embodiments, a visual acuity assessment based on OKN determines that visual acuity improves in a patient after treatment with AAV gene therapy by 5%, 10%, 15%, 20%, 25%, 30%, 35%, 40% 45%, 50%, 55%, 60%, 65%, 70%, 75%, 80%, 85%, 90%, 95% or 100%. In certain embodiments, a visual acuity assessment based on OKN determines that visual acuity does not further deteriorate in a patient after treatment with AAV gene therapy.

[0050] In certain embodiments, visual acuity is assessed in a patient presenting with Batten-CLN2-associated vision loss by measuring OKN before the patient has been treated with an AAV, preferably AAV8 or AAV9, encoding TPP1. Specifically, the patient presenting with Batten-CLN2-associated vision loss is at the age, and/or within the age range described above. In certain embodiments, visual acuity is assessed in a patient up to 5 years old presenting with Batten-CLN2-associated vision loss by measuring OKN after the patient has been treated with an AAV, preferably AAV8 or AAV9, encoding Tripeptidyl-Peptidase 1. In certain embodiments, a visual acuity assessment based on OKN determines that visual acuity does not decrease after treatment with AAV gene therapy. In certain embodiments, a visual acuity assessment based on OKN determines that visual acuity improves in a patient after treatment with AAV gene therapy by at least 5%, 10%, 15%, 20%, 25%, 30%, 35%, 40% 45%, 50%, 55%, 60%, 65%, 70%, 75%, 80%, 85%, 90%, 95% or at least 100%. In certain embodiments, a visual acuity assessment based on OKN determines that visual acuity does not further deteriorate in a patient after treatment with AAV gene therapy.

[0051] In certain embodiments, visual acuity is assessed in a patient presenting with Batten-CLN1-associated vision loss by measuring OKN before the patient has been treated with an AAV, preferably AAV8 or AAV9, encoding Palmitoyl-Protein Thioesterase 1 (PPT1). Specifically, the patient up to 5 years old presenting with Batten-CLN1-associated vision loss is at the age, and/or within the age range described above. In certain embodiments, visual acuity is assessed in a patient presenting with Batten-CLN1-associated vision loss by measuring OKN after the patient has been treated with an AAV, preferably AAV8 or AAV9, encoding PPT1. In certain embodiments, a visual acuity assessment based on OKN determines that visual acuity does not decrease after treatment with AAV gene therapy. In certain embodiments, a visual acuity assessment based on OKN determines that visual acuity improves in a patient after treatment with AAV gene therapy by 5%, 10%, 15%, 20%, 25%, 30%, 35%, 40% 45%, 50%, 55%, 60%, 65%, 70%, 75%, 80%, 85%, 90%, 95% or 100%. In certain embodiments, a visual acuity assessment based on OKN determines that visual acuity does not further deteriorate in a patient after treatment with AAV gene therapy.

[0052] In certain embodiments, visual acuity is assessed in a patient presenting with Batten-CLN1-associated vision loss by measuring OKN before the patient has been treated with an AAV, preferably AAV8 or AAV9, encoding PPT1. Specifically, the patient presenting with Batten-CLN1-associated vision loss is at the age, and/or within the age range described above. In certain embodiments, visual acuity is assessed in a patient up to 5 years old presenting with Batten-CLN1-associated vision loss by measuring OKN after the patient has been treated with an AAV, preferably AAV8 or AAV9, encoding PPT 1. In certain embodiments, a visual acuity assessment based on OKN determines that visual acuity does not decrease after treatment with AAV gene therapy. In certain embodiments, a visual acuity assessment based on OKN determines that visual acuity improves in a patient after treatment with AAV gene therapy by at least 5%, 10%, 15%, 20%, 25%, 30%, 35%, 40% 45%, 50%, 55%, 60%, 65%, 70%, 75%, 80%, 85%, 90%, 95% or at least 100%. In certain embodiments, a visual acuity assessment based on OKN determines that visual acuity does not further deteriorate in a patient after treatment with AAV gene therapy.

[0053] In certain embodiments, visual acuity is assessed in a patient presenting with Batten-CLN3-associated vision loss by measuring OKN before the patient has been treated with an AAV, preferably AAV8 or AAV9, encoding Battenin (CLN3). Specifically, the patient presenting with Batten-CLN3-associated vision loss is at the age, and/or within the age range described above. In certain embodiments, visual acuity is assessed in a patient up to 5 years old presenting with Batten-CLN3-associated vision loss by measuring OKN after the patient has been treated with an AAV, preferably AAV8 or AAV9, encoding Battenin (CLN3). In certain embodiments, a visual acuity assessment based on OKN determines that visual acuity does not decrease after treatment with AAV gene therapy. In certain embodiments, a visual acuity assessment based on OKN determines that visual acuity improves in a patient after treatment with AAV gene therapy by 5%, 10%, 15%, 20%, 25%, 30%, 35%, 40% 45%, 50%, 55%, 60%, 65%, 70%, 75%, 80%, 85%, 90%, 95% or 100%. In certain embodiments, a visual acuity assessment based on OKN determines that visual acuity does not further deteriorate in a patient after treatment with AAV gene therapy.

[0054] In certain embodiments, visual acuity is assessed in a patient presenting with Batten-CLN3-associated vision loss by measuring OKN before the patient has been treated with an AAV, preferably AAV8 or AAV9, encoding Battenin (CLN3). Specifically, the patient presenting with Batten-CLN3-associated vision loss is at the age, and/or within the age range described above. In certain embodiments, visual acuity is assessed in a patient up to 5 years old presenting with Batten-CLN3-associated vision loss by measuring OKN after the patient has been treated with an AAV, preferably AAV8 or AAV9, encoding Battenin (CLN3). In certain embodiments, a visual acuity assessment based on OKN determines that visual acuity does not decrease after treatment with AAV gene therapy. In certain embodiments, a visual acuity assessment based on OKN determines that visual acuity improves in a patient after treatment with AAV gene therapy by at least 5%, 10%, 15%, 20%, 25%, 30%, 35%, 40% 45%, 50%, 55%, 60%, 65%, 70%, 75%, 80%, 85%, 90%, 95% or at least 100%. In certain embodiments, a visual acuity assessment based on OKN determines that visual acuity does not further deteriorate in a patient after treatment with AAV gene therapy.

[0055] In certain embodiments, visual acuity is assessed in a patient presenting with Batten-CLN6-associated vision loss by measuring OKN before the patient has been treated with an AAV, preferably AAV8 or AAV9, encoding CLN6 Transmembrane ER Protein (CLN6). Specifically, the patient up to 5 years old presenting with Batten-CLN6-associated vision loss is at the age, and/or within the age range described above. In certain embodiments, visual acuity is assessed in a patient presenting with Batten-CLN6-associated vision loss by measuring OKN after the patient has been treated with an AAV, preferably AAV8 or AAV9, encoding CLN6 Transmembrane ER Protein (CLN6). In certain embodiments, a visual acuity assessment based on OKN determines that visual acuity does not decrease after treatment with AAV gene therapy. In certain embodiments, a visual acuity assessment based on OKN determines that visual acuity improves in a patient after treatment with AAV gene therapy by 5%, 10%, 15%, 20%, 25%, 30%, 35%, 40% 45%, 50%, 55%, 60%, 65%, 70%, 75%, 80%, 85%, 90%, 95% or 100%. In certain embodiments, a visual acuity assessment based on OKN determines that visual acuity does not further deteriorate in a patient after treatment with AAV gene therapy.

[0056] In certain embodiments, visual acuity is assessed in a patient presenting with Batten-CLN6-associated vision loss by measuring OKN before the patient has been treated with an AAV, preferably AAV8 or AAV9, encoding CLN6 Transmembrane ER Protein (CLN6). Specifically, the patient up to 5 years old presenting with Batten-CLN6-associated vision loss is at the age, and/or within the age range described above. In certain embodiments, visual acuity is assessed in a patient presenting with Batten-CLN6-associated vision loss by measuring OKN after the patient has been treated with an AAV, preferably AAV8 or AAV9, encoding CLN6 Transmembrane ER Protein (CLN6). In certain embodiments, a visual acuity assessment based on OKN determines that visual acuity does not decrease after treatment with AAV gene therapy. In certain embodiments, a visual acuity assessment based on OKN determines that visual acuity improves in a patient after treatment with AAV gene therapy by at least 5%, 10%, 15%, 20%, 25%, 30%, 35%, 40% 45%, 50%, 55%, 60%, 65%, 70%, 75%, 80%, 85%, 90%, 95% or at least 100%. In certain embodiments, a visual acuity assessment based on OKN determines that visual acuity does not further deteriorate in a patient after treatment with AAV gene therapy.

[0057] In certain embodiments, visual acuity is assessed in a patient presenting with Batten-CLN7-associated vision loss by measuring OKN before the patient has been treated with an AAV, preferably AAV8 or AAV9, encoding Major Facilitator Superfamily Domain Containing 8 (MFSD8). Specifically, the patient up to 5 years old presenting with Batten-CLN7-associated vision loss is at the age, and/or within the age range described above. In certain embodiments, visual acuity is assessed in a patient presenting with Batten-CLN7-associated vision loss by measuring OKN after the patient has been treated with an AAV, preferably AAV8 or AAV9, encoding MFSD8. In certain embodiments, a visual acuity assessment based on OKN determines that visual acuity does not decrease after treatment with AAV gene therapy. In certain embodiments, a visual acuity assessment based on OKN determines that visual acuity improves in a patient after treatment with AAV gene therapy by 5%, 10%, 15%, 20%, 25%, 30%, 35%, 40% 45%, 50%, 55%, 60%, 65%, 70%, 75%, 80%, 85%, 90%, 95% or 100%. In certain embodiments, a visual acuity assessment based on OKN determines that visual acuity does not further deteriorate in a patient after treatment with AAV gene therapy.

[0058] In certain embodiments, visual acuity is assessed in a patient presenting with Batten-CLN7-associated vision loss by measuring OKN before the patient has been treated with an AAV, preferably AAV8 or AAV9, encoding MFSD8. Specifically, the patient presenting with Batten-CLN7-associated vision loss is at the age, and/or within the age range described above. In certain embodiments, visual acuity is assessed in a patient up to 5 years old presenting with Batten-CLN7-associated vision loss by measuring OKN after the patient has been treated with an AAV, preferably AAV8 or AAV9, encoding MFSD8. In certain embodiments, a visual acuity assessment based on OKN determines that visual acuity does not decrease after treatment with AAV gene therapy. In certain embodiments, a visual acuity assessment based on OKN determines that visual acuity improves in a patient after treatment with AAV gene therapy by at least 5%, 10%, 15%, 20%, 25%, 30%, 35%, 40% 45%, 50%, 55%, 60%, 65%, 70%, 75%, 80%, 85%, 90%, 95% or at least 100%. In certain embodiments, a visual acuity assessment based on OKN determines that visual acuity does not further deteriorate in a patient after treatment with AAV gene therapy.

[0059] Subretinal administration via vitrectomy is a surgical procedure performed by trained retinal surgeons that involves a vitrectomy with the subject under local anesthesia, and subretinal injection of the gene therapy into the retina (see, e.g., Campochiaro et al., 2017, Hum Gen Ther 28(1):99-111, which is incorporated by reference herein in its entirety). Alternatively, subretinal administration can be performed without vitrectomy. In a specific embodiment, the subretinal administration without vitrectomy is performed via the suprachoroidal space using a suprachoroidal catheter which injects drug into the subretinal space, such as a subretinal drug delivery device that comprises a catheter which can be inserted and tunneled through the suprachoroidal space to the posterior pole, where a small needle injects into the subretinal space (see, e.g., Baldassarre et al., 2017, Subretinal Delivery of Cells via the Suprachoroidal Space: Janssen Trial. In: Schwartz et al. (eds) Cellular Therapies for Retinal Disease, Springer, Cham; International Patent Application Publication No. WO 2016/040635 A1; each of which is incorporated by reference herein in its entirety). In another specific embodiment, the subretinal administration without vitrectomy is performed via peripheral injection. In other words, the recombinant vector can be delivered to the subretinal space by peripheral injection into the retina (i.e., peripheral to the optic disc, fovea and macula located in the back of the eye) without performing a vitrectomy. This can be accomplished by transvitreal injection. Suprachoroidal administration procedures involve administration of a drug to the suprachoroidal space of the eye, and are normally performed using a suprachoroidal drug delivery device such as a microinjector with a microneedle (see, e.g., Hariprasad, 2016, Retinal Physician 13: 20-23; Goldstein, 2014, Retina Today 9(5): 82-87; each of which is incorporated by reference herein in its entirety).

[0060] The suprachoroidal drug delivery devices that can be used to deposit the recombinant vector in the suprachoroidal space according to the invention described herein include, but are not limited to, suprachoroidal drug delivery devices manufactured by Clearside® Biomedical, Inc. (see, for example, Hariprasad, 2016, Retinal Physician 13: 20-23) and MedOne suprachoroidal catheters. The subretinal drug delivery devices that can be used to deposit the recombinant vector in the subretinal space via the suprachoroidal space according to the invention described herein include, but are not limited to, subretinal drug delivery devices manufactured by Janssen Pharmaceuticals, Inc. (see, for example, International Patent Application Publication No. WO 2016/040635 A1) The subretinal drug delivery devices that can be used to deposit the recombinant vector in the subretinal space via the peripheral injection approach according to the invention described herein include, but are not limited to, sharp needles that can be inserted into the sclera via the superior or inferior side of the eye (e.g., at the 2 or 10 o'clock position) and pass all the way through the vitreous to inject the retina on the other side, and trochars that can be inserted into the sclera to allow a subretinal cannula to be inserted into the eye and through the vitreous to the area of desired injection. In a specific embodiment, administration to the outer surface of the sclera is performed by a juxtascleral drug delivery device comprising a cannula whose tip can be inserted and kept in direct apposition to the scleral surface.

[0061] Suprachoroidal, subretinal, juxtascleral, intravitreal, subconjunctival, and/or intraretinal administration should result in delivery of the soluble therapeutic product to the retina, the vitreous humor, and/or the aqueous humor. The expression of the therapeutic product by retinal cells, e.g., rod, cone, retinal pigment epithelial, horizontal, bipolar, amacrine, ganglion, and/or Müller cells, results in delivery and maintenance of the therapeutic product in the retina, the vitreous humor, and/or the aqueous humor. In specific embodiments, because the therapeutic product is continuously produced, maintenance of low concentrations can be effective. The concentration of the therapeutic product can be measured in patient samples of the vitreous humour and/or aqueous from the anterior chamber of the treated eye. Alternatively, vitreous humour concentrations can be estimated and/or monitored by measuring the patient's serum concentrations of the therapeutic product—the ratio of systemic to vitreal exposure to the therapeutic product is about 1:90,000. (E.g., see, vitreous humor and serum concentrations of ranibizumab reported in Xu L, et al., 2013, Invest. Opthal. Vis. Sci. 54: 1616-1624, at p. 1621 and Table 5 at p. 1623, which is incorporated by reference herein in its entirety).

[0062] Pharmaceutical compositions suitable for suprachoroidal, subretinal, juxtascleral, intravitreal, subconjunctival, and/or intraretinal administration comprise a suspension of the recombinant vector in a formulation buffer comprising a physiologically compatible aqueous buffer, a surfactant and optional excipients.

[0063] The invention has several advantages over standard of care treatments that involve repeated ocular injections of high dose boluses of therapeutic products that dissipate over time resulting in peak and trough levels. Sustained expression of the therapeutic product, as opposed to injecting a therapeutic product repeatedly, allows for a more consistent levels of antibody to be present at the site of action, and is less risky and more convenient for patients, since fewer injections need to be made, resulting in fewer doctor visits. Consistent protein production may leads to better clinical outcomes as edema rebound in the retina is less likely to occur. Furthermore, in certain embodiments, therapeutic products expressed from recombinant vectors are post-translationally modified in a different manner than those that are directly injected because of the different microenvironment present during and after translation. Without being bound by any particular theory, this results in therapeutic products that have different diffusion, bioactivity, distribution, affinity, pharmacokinetic, and immunogenicity characteristics, such that the therapeutic products delivered to the site of action are “biobetters” in comparison with directly injected therapeutic products.

[0064] In addition, when the therapeutic products are antibodies, antibodies expressed from recombinant vectors in vivo are not likely to contain degradation products associated with antibodies produced by recombinant technologies, such as protein aggregation and protein oxidation. Aggregation is an issue associated with protein production and storage due to high protein concentration, surface interaction with manufacturing equipment and containers, and purification with certain buffer systems. These conditions, which promote aggregation, do not exist in antibody expression in gene therapy. Oxidation, such as methionine, tryptophan, and histidine oxidation, is also associated with protein production and storage, and is caused by stressed cell culture conditions, metal and air contact, and impurities in buffers and excipients. The proteins expressed from recombinant vectors in vivo may also oxidize in a stressed condition. However, humans, and many other organisms, are equipped with an antioxidation defense system, which not only reduces the oxidation stress, but sometimes also repairs and/or reverses the oxidation. Thus, proteins produced in vivo are not likely to be in an oxidized form. Both aggregation and oxidation could affect the potency, pharmacokinetics (clearance), and immunogenicity.

[0065] Unlike small molecule drugs, biologics usually comprise a mixture of many variants with different modifications or forms that have a different potency, pharmacokinetics, and safety profile. For therapeutic products that are post-translationally modified upon expression in cells of the eye, it is not essential that every molecule produced either in the gene therapy or protein therapy approach be fully post-translationally modified. Rather, the population of such therapeutic products that are produced should have sufficient post-translational modification (for example, from about 1% to about 10% of the population, from about 1% to about 20% of the population, from about 1% to about 50% of the population, or from about 10% to about 50% of the population) to demonstrate efficacy. The goal of gene therapy treatment provided herein is to slow or arrest the progression of the pathology of the eye, and to slow or prevent loss of vision with minimal intervention/invasive procedures. Efficacy may be monitored by measuring BCVA (Best-Corrected Visual Acuity), intraocular pressure, slit lamp biomicroscopy, indirect ophthalmoscopy, SD-OCT (SD-Optical Coherence Tomography), electroretinography (ERG). Signs of vision loss, infection, inflammation and other safety events, including retinal detachment may also be monitored. In certain embodiments, retinal thickness may be monitored to determine efficacy of the treatments provided herein. Without being bound by any particular theory, in certain embodiment, thickness of the retina may be used as a clinical readout, wherein the greater reduction in retinal thickness or the longer period of time before thickening of the retina, the more efficacious the treatment. Retinal thickness may be determined, for example, by SD-OCT. SD-OCT is a three-dimensional imaging technology which uses low-coherence interferometry to determine the echo time delay and magnitude of backscattered light reflected off an object of interest. OCT can be used to scan the layers of a tissue sample (e.g., the retina) with 3 to 15 μm axial resolution, and SD-OCT improves axial resolution and scan speed over previous forms of the technology (Schuman, 2008, Trans. Am. Opthamol. Soc. 106:426-458). Retinal function may be determined, for example, by ERG. ERG is a non-invasive electrophysiologic test of retinal function, approved by the FDA for use in humans, which examines the light sensitive cells of the eye (the rods and cones), and their connecting ganglion cells, in particular, their response to a flash stimulation.

### 4.1 ILLUSTRATIVE EMBODIMENTS

[0066] 4.1.1 Set 1

[0067] 1. A method of subretinal administration without vitrectomy for treating a pathology of the eye, comprising administering to the subretinal space in the eye of a human subject in need of treatment a recombinant viral vector comprising a nucleotide sequence encoding a therapeutic product such that the therapeutic product is expressed and results in treatment of the pathology of the eye, wherein the method does not comprise performing a vitrectomy on the eye of said human patient.

[0068] 2. The method of paragraph 1, wherein the administering step comprises administering to the subretinal space in the eye of said human subject the recombinant viral vector therapeutic product via the suprachoroidal space in the eye of said human subject.

[0069] 3. The method of paragraph 2, wherein the administering step is by the use of a subretinal drug delivery device comprising a catheter that can be inserted and tunneled through the suprachoroidal space toward the posterior pole, where a small needle injects into the subretinal space.

[0070] 4. The method of paragraph 3, wherein the administering step comprises inserting and tunneling the catheter of the subretinal drug delivery device through the suprachoroidal space.

[0071] 5. A method of suprachoroidal administration for treating a pathology of the eye, comprising administering to the suprachoroidal space in the eye of a human subject in need of treatment a recombinant viral vector comprising a nucleotide sequence encoding a therapeutic product such that the therapeutic product is expressed and results in treatment of the pathology of the eye.

[0072] 6. The method of paragraph 5, wherein the administering step is by injecting the recombinant viral vector into the suprachoroidal space using a suprachoroidal drug delivery device.

[0073] 7. The method of paragraph 5 or 6, wherein the suprachoroidal drug delivery device is a microinjector.

[0074] 8. A method of administration to the outer space of the sclera for treating a pathology of the eye, comprising administering to the outer surface of the sclera in the eye of a human subject in need of treatment a recombinant viral vector comprising a nucleotide sequence encoding a therapeutic product such that the therapeutic product is expressed and results in treatment of the pathology of the eye.

[0075] 9. The method of paragraph 8, wherein the administering step is by the use of a juxtascleral drug delivery device that comprises a cannula whose tip can be inserted and kept in direct apposition to the scleral surface.

[0076] 10. The method of paragraph 9, wherein the administering step comprises inserting and keeping the tip of the cannula in direct apposition to the scleral surface.

[0077] 11. The method of any one of paragraphs 1-10, wherein the therapeutic product is not an anti-human vascular endothelial growth factor (hVEGF) antibody.

[0078] 12. The method of any one of paragraphs 1-11, wherein the pathology of the eye is not associated with neovascular age-related macular degeneration (nAMID).

[0079] 13. A method of subretinal administration accompanied by vitrectomy for treating a pathology of the eye, comprising administering to the subretinal space in the eye of a human subject in need of treatment a recombinant viral vector comprising a nucleotide sequence encoding a therapeutic product such that the therapeutic product is expressed and results in treatment of the pathology of the eye, wherein the method comprises performing a vitrectomy on the eye of said human patient, and wherein the therapeutic product is not anti-human vascular endothelial growth factor (hVEGF) antibody

[0080] 14. The method of paragraph 13, wherein the vitrectomy is a partial vitrectomy.

[0081] 15. A method of subretinal administration for treating a pathology of the eye, comprising administering to the subretinal space peripheral to the optic disc, fovea and macula located in the back of the eye of a human subject in need of treatment a recombinant viral vector comprising a nucleotide sequence encoding a therapeutic product such that the therapeutic product is expressed and results in treatment of the pathology of the eye, wherein the method does not comprise performing a vitrectomy on the eye of said human patient.

[0082] 16. The method of paragraph 15, wherein the administering step is by transvitreal injection.

[0083] 17. The method of paragraph 16, wherein the transvitreal injection comprises inserting a sharp needle into the sclera via the superior or inferior side of the eye and passing the sharp needle all the way through the vitreous to inject the recombinant viral vector to the subretinal space on the other side.

[0084] 18. The method of paragraph 16, wherein the transvitreal injection comprises inserting a trochar into the sclera and inserting a cannula through the trochar and through the vitreous to inject the recombinant viral vector to the subretinal space on the other side

[0085] 19. The method of any one of paragraphs 15-18, wherein the therapeutic product is an anti-hVEGF antibody.

[0086] 20. The method of paragraph 19, wherein the anti-hVEGF antibody is an anti-hVEGF antigen-binding fragment.

[0087] 21. The method of paragraph 20, wherein the anti-hVEGF antigen-binding fragment is a Fab, F(ab′)₂, or single chain variable fragment (scFv).

[0088] 22. The method of any one of paragraphs 19-21, wherein the anti-hVEGF antibody comprises a heavy chain comprising the amino acid sequence of SEQ ID NO:2 or SEQ ID NO:4, and a light chain comprising the amino acid sequence of SEQ ID NO:1, or SEQ ID NO:3.

[0089] 23. The method of any one of paragraphs 19-21, wherein the anti-hVEGF antibody comprises light chain CDRs 1-3 of SEQ ID NOs:14-16 and heavy chain CDRs 1-3 of SEQ ID NOs:17-19 or SEQ ID NOs:20, 18, and 21.

[0090] 24. The method of any one of paragraphs 19-23, wherein the pathology of the eye is associated with nAMD, dry age-related macular degeneration (dry AMD), retinal vein occlusion (RVO), diabetic macular edema (DME), or diabetic retinopathy (DR).

[0091] 25. The method of any one of paragraphs 19-23, wherein the pathology of the eye is associated with nAMD.

[0092] 26. The method of any one of paragraphs 1-11 and 13-18, wherein:
[0093] (1) the pathology of the eye is associated with Batten-CLN1 and the therapeutic product is Palmitoyl-Protein Thioesterase 1 (PPT1);
[0094] (2) the pathology of the eye is associated with Batten-CLN2 and the therapeutic product is Tripeptidyl-Peptidase 1 (TPP1);
[0095] (3) the pathology of the eye is associated with Batten-CLN3 and the therapeutic product is Battenin (CLN3);
[0096] (4) the pathology of the eye is associated with Batten-CLN6 and the therapeutic product is CLN6 Transmembrane ER Protein (CLN6);
[0097] (5) the pathology of the eye is associated with Batten-CLN7 and the therapeutic product is Major Facilitator Superfamily Domain Containing 8 (MFSD8);
[0098] (6) the pathology of the eye is associated with Usher's-Type 1 and the therapeutic product is Myosin VIIA (MYO7A);
[0099] (7) the pathology of the eye is associated with Usher's-Type 1 and the therapeutic product is Cadherin Related 23 (CDH23);
[0100] (8) the pathology of the eye is associated with Usher's-Type 2 and the therapeutic product is Protocadherin Related 15 (PCDH15);
[0101] (9) the pathology of the eye is associated with Usher's-Type 2 and the therapeutic product is Usherin (USH2A);
[0102] (10) the pathology of the eye is associated with Usher's-Type 3 and the therapeutic product is Clarin 1 (CLRN1);
[0103] (11) the pathology of the eye is associated with Stargardt's and the therapeutic product is ATP Binding Cassette Subfamily A Member 4 (ABCA4);
[0104] (12) the pathology of the eye is associated with Stargardt's and the therapeutic product is ELOVL Fatty Acid Elongase 4 (ELOVL4);
[0105] (13) the pathology of the eye is associated with uveitis and the therapeutic product is an anti-Interleukin 6 (IL6) monoclonal antibody;
[0106] (14) the pathology of the eye is associated with uveitis and the therapeutic product is an anti-TNF-alpha (TNF) monoclonal antibody;
[0107] (15) the pathology of the eye is associated with diabetic macular edema (DME) and the therapeutic product is an anti-IL6 monoclonal antibody;
[0108] (16) the pathology of the eye is associated with red-green color blindness and the therapeutic product is L opsin (OPN1LW);
[0109] (17) the pathology of the eye is associated with red-green color blindness and the therapeutic product is M opsin (OPN1MW);
[0110] (18) the pathology of the eye is associated with blue cone monochromacy and the therapeutic product is M opsin (OPN1MW);
[0111] (19) the pathology of the eye is associated with Leber congenital amaurosis-1 (LCA 1) and the therapeutic product is Guanylate Cyclase 2D, Retinal (GUCY2D);
[0112] (20) the pathology of the eye is associated with Leber congenital amaurosis-2 (LCA 2) and the therapeutic product is Retinoid Isomerohydrolase RPE65 (RPE65);
[0113] (21) the pathology of the eye is associated with LCA 3 and the therapeutic product is Spermatogenesis Associated 7 (SPATA7);
[0114] (22) the pathology of the eye is associated with Leber congenital amaurosis-4 (LCA 4) and the therapeutic product is Aryl Hydrocarbon Receptor Interacting Protein Like 1 (AIPL1);
[0115] (23) the pathology of the eye is associated with Leber congenital amaurosis-5 (LCA 5) and the therapeutic product is Lebercilin (LCA5);
[0116] (24) the pathology of the eye is associated with Leber congenital amaurosis-6 (LCA 6) and the therapeutic product is RPGR Interacting Protein 1 (RPGRIP1);
[0117] (25) the pathology of the eye is associated with Leber congenital amaurosis-7 (LCA 7) and the therapeutic product is Cone-Rod Homeobox (CRX);
[0118] (26) the pathology of the eye is associated with Leber congenital amaurosis-8 (LCA 8) and the therapeutic product is Crumbs Cell Polarity Complex Component 1 (CRB1);
[0119] (27) the pathology of the eye is associated with Leber congenital amaurosis-9 (LCA 9) and the therapeutic product is Nicotinamide Nucleotide Adenylyltransferase 1 (NMNAT1);
[0120] (28) the pathology of the eye is associated with Leber congenital amaurosis-10 (LCA 10) and the therapeutic product is Centrosomal Protein 290 (CEP290);
[0121] (29) the pathology of the eye is associated with Leber congenital amaurosis-11 (LCA 11) and the therapeutic product is Inosine Monophosphate Dehydrogenase 1 (IMPDH1);
[0122] (30) the pathology of the eye is associated with Leber congenital amaurosis-12 (LCA 12) and the therapeutic product is Retinal Degeneration 3, GUCY2D regulator (RD3);
[0123] (31) the pathology of the eye is associated with Leber congenital amaurosis-13 (LCA 13) and the therapeutic product is Retinol Dehydrogenase 12 (RDH12);
[0124] (32) the pathology of the eye is associated with Leber congenital amaurosis-14 (LCA 14) and the therapeutic product is Lecithin Retinol Acyltransferase (LRAT);
[0125] (33) the pathology of the eye is associated with Leber congenital amaurosis-15 (LCA 15) and the therapeutic product is Tubby Like Protein 1 (TULP1);
[0126] (34) the pathology of the eye is associated with Leber congenital amaurosis-16 (LCA 16) and the therapeutic product is Potassium Voltage-Gated Channel Subfamily J Member 13 (KCNJ13);
[0127] (35) the pathology of the eye is associated with Leber's hereditary optic neuropathy (LHON) and the therapeutic product is Mitochondrially Encoded NADH Dehydrogenase 1 (MT-ND1);
[0128] (36) the pathology of the eye is associated with LHON and the therapeutic product is Mitochondrially Encoded NADH Dehydrogenase 4 (MT-ND4);
[0129] (37) the pathology of the eye is associated with LHON and the therapeutic product is Mitochondrially Encoded NADH Dehydrogenase 6 (MT-ND6);
[0130] (38) the pathology of the eye is associated with neuromyelitis optica (NMO) and the therapeutic product is an anti-complement C5 monoclonal antibody;
[0131] (39) the pathology of the eye is associated with NMO and the therapeutic product is an anti-IL6 monoclonal antibody;
[0132] (40) the pathology of the eye is associated with uveitis and the therapeutic product is an anti-complement C5 monoclonal antibody;
[0133] (41) the pathology of the eye is associated with uveitis and the therapeutic product is Angiotensin I Converting Enzyme (ACE);
[0134] (42) the pathology of the eye is associated with uveitis and the therapeutic product is Interleukin 10 (IL10);
[0135] (43) the pathology of the eye is associated with uveitis and the therapeutic product is an anti-TNF monoclonal antibody;
[0136] (44) the pathology of the eye is associated with choroideremia and the therapeutic product is Rab Escort Protein 1 (CHM);
[0137] (45) the pathology of the eye is associated with X-linked retinoschisis (XLRS) and the therapeutic product is Retinoschisin (RS1);
[0138] (46) the pathology of the eye is associated with Bardet-Biedl syndrome 1 and the therapeutic product is Bardet-Biedl Syndrome 1 (BBS1);
[0139] (47) the pathology of the eye is associated with Bardet-Biedl syndrome 2 and the therapeutic product is Bardet-Biedl Syndrome 2 (BBS2);
[0140] (48) the pathology of the eye is associated with Bardet-Biedl syndrome 3 and the therapeutic product is ADP Ribosylation Factor Like GTPase 6 (ARL6);
[0141] (49) the pathology of the eye is associated with Bardet-Biedl syndrome 4 and the therapeutic product is Bardet-Biedl Syndrome 4 (BBS4);
[0142] (50) the pathology of the eye is associated with Bardet-Biedl syndrome 5 and the therapeutic product is Bardet-Biedl Syndrome 5 (BBS5);
[0143] (51) the pathology of the eye is associated with Bardet-Biedl syndrome 6 and the therapeutic product is McKusick-Kaufman Syndrome (MKKS);
[0144] (52) the pathology of the eye is associated with Bardet-Biedl syndrome 7 and the therapeutic product is Bardet-Biedl Syndrome 7 (BBS7);
[0145] (53) the pathology of the eye is associated with Bardet-Biedl syndrome 8 and the therapeutic product is Tetratricopeptide Repeat Domain 8 (TTC8);
[0146] (54) the pathology of the eye is associated with Bardet-Biedl syndrome 9 and the therapeutic product is Bardet-Biedl Syndrome 9 (BBS9);
[0147] (55) the pathology of the eye is associated with Bardet-Biedl syndrome 10 and the therapeutic product is Bardet-Biedl Syndrome 10 (BBS10);
[0148] (56) the pathology of the eye is associated with Bardet-Biedl syndrome 11 and the therapeutic product is Tripartite Motif Containing 32 (TRIM32);
[0149] (57) the pathology of the eye is associated with Bardet-Biedl syndrome 12 and the therapeutic product is Bardet-Biedl Syndrome 12 (BBS12);
[0150] (58) the pathology of the eye is associated with Bardet-Biedl syndrome 13 and the therapeutic product is MKS Transition Zone Complex Subunit 1 (MKS1);
[0151] (59) the pathology of the eye is associated with Bardet-Biedl syndrome 14 and the therapeutic product is Centrosomal Protein 290 (CEP290);
[0152] (60) the pathology of the eye is associated with Bardet-Biedl syndrome 15 and the therapeutic product is WD Repeat Containing Planar Cell Polarity Effector (WDPCP);
[0153] (61) the pathology of the eye is associated with Bardet-Biedl syndrome 16 and the therapeutic product is Serologically Defined Colon Cancer Antigen 8 (SDCCAG8);
[0154] (62) the pathology of the eye is associated with Bardet-Biedl syndrome 17 and the therapeutic product is Leucine Zipper Transcription Factor Like 1 (LZTFL1);
[0155] (63) the pathology of the eye is associated with Bardet-Biedl syndrome 18 and the therapeutic product is BBSome Interacting Protein 1 (BBIP1);
[0156] (64) the pathology of the eye is associated with Bardet-Biedl syndrome 19 and the therapeutic product is Intraflagellar Transport 27 (IFT27);
[0157] (65) the pathology of the eye is associated with cone dystrophy and the therapeutic product is Guanylate Cyclase Activator 1A (GUCA1A);
[0158] (66) the pathology of the eye is associated with optic atrophy and the therapeutic product is OPA1 Mitochondrial Dynamin Like GTPase (OPA1);
[0159] (67) the pathology of the eye is associated with retinitis pigmentosa 1 and the therapeutic product is RP1 Axonemal Microtubule Associated (RP1);
[0160] (68) the pathology of the eye is associated with retinitis pigmentosa 2 and the therapeutic product is RP2 Activator of ARL3 GTPase (RP2);
[0161] (69) the pathology of the eye is associated with retinitis pigmentosa 7 and the therapeutic product is Peripherin 2 (PRPH2);
[0162] (70) the pathology of the eye is associated with retinitis pigmentosa 11 and the therapeutic product is Pre-mRNA Processing Factor 31(PRPF31);
[0163] (71) the pathology of the eye is associated with retinitis pigmentosa 12 and the therapeutic product is Crumbs Cell Polarity Complex Component 1 (CRB1);
[0164] (72) the pathology of the eye is associated with retinitis pigmentosa 13 and the therapeutic product is Pre-mRNA Processing Factor 8 (PRPF8);
[0165] (73) the pathology of the eye is associated with retinitis pigmentosa 25 and the therapeutic product is Eyes Shut Homolog (EYS);
[0166] (74) the pathology of the eye is associated with retinitis pigmentosa 28 and the therapeutic product is FAM161 Centrosomal Protein A (FAM161A);
[0167] (75) the pathology of the eye is associated with retinitis pigmentosa 37 and the therapeutic product is Nuclear Receptor Subfamily 2 Group E Member 3 (NR2E3);
[0168] (76) the pathology of the eye is associated with retinitis pigmentosa 38 and the therapeutic product is MER Proto-Oncogene, Tyrosine Kinase (MERTK);
[0169] (77) the pathology of the eye is associated with retinitis pigmentosa 40 and the therapeutic product is Phosphodiesterase 6B (PDE6B);
[0170] (78) the pathology of the eye is associated with retinitis pigmentosa 41 and the therapeutic product is Prominin 1 (PROM1);
[0171] (79) the pathology of the eye is associated with retinitis pigmentosa 43 and the therapeutic product is Phosphodiesterase 6A (PDE6A);
[0172] (80) the pathology of the eye is associated with retinitis pigmentosa 56 and the therapeutic product is Interphotoreceptor Matrix Proteoglycan 2 (IMPG2);
[0173] (81) the pathology of the eye is associated with petinitis pigmentosa 62 and the therapeutic product is Male Germ Cell Associated Kinase (MAK);
[0174] (82) the pathology of the eye is associated with retinitis pigmentosa 80 and the therapeutic product is Intraflagellar Transport 140 (IFT140);
[0175] (83) the pathology of the eye is associated with dry AMD and the therapeutic product is an anti-complement C5 monoclonal antibody;
[0176] (84) the pathology of the eye is associated with dry AMD and the therapeutic product is an anti-membrane attack complex (MAC) monoclonal antibody;
[0177] (85) the pathology of the eye is associated with dry AMD and the therapeutic product is HtrA Serine Peptidase 1 (HTRA1);
[0178] (86) the pathology of the eye is associated with Best disease and the therapeutic product is Bestrophin 1 (BEST1);
[0179] (87) the pathology of the eye is associated with dry AMD and the therapeutic product is a complement factor B anti sense oligonucleotide;
[0180] (88) the pathology of the eye is associated with dry AMD and the therapeutic product is an anti-beta-amyloid monoclonal antibody;
[0181] (89) the pathology of the eye is associated with dry AMD and the therapeutic product is CD59 glycoprotein (CD59);
[0182] (90) the pathology of the eye is associated with dry AMD and the therapeutic product is Channelrhodopsin-1 (ChR1);
[0183] (91) the pathology of the eye is associated with dry AMD and the therapeutic product is Channelrhodopsin-2 (ChR2), the light-sensitive protein discovered in Chlamydomonas reinhardtii;
[0184] (92) the pathology of the eye is associated with dry AMD and the therapeutic product is an anti-complement factor C5a aptamer;
[0185] (93) the pathology of the eye is associated with dry AMD and the therapeutic product is anti-complement factor D monoclonal antibody;
[0186] (94) the pathology of the eye is associated with age-related retinal ganglion cell (RGC) degeneration and the therapeutic product is DnaJ heat shock protein family (Hsp40) member C3 (DNAJC3);
[0187] (95) the pathology of the eye is associated with blue cone monochromacy (BCM) and the therapeutic product is L opsin (OPN1LW);
[0188] (96) the pathology of the eye is associated with glaucoma and the therapeutic product is beta-2 adrenoceptor siRNA;
[0189] (97) the pathology of the eye is associated with glaucoma and the therapeutic product is Caspase-2 (CASP2);
[0190] (98) the pathology of the eye is associated with glaucoma and the therapeutic product is Insulin Receptor Substrate 1 (IRS1);
[0191] (99) the pathology of the eye is associated with glaucoma and the therapeutic product is HIF-1 Responsive Protein RTP801 (RTP801);
[0192] (100) the pathology of the eye is associated with glaucoma and the therapeutic product is Transforming Growth Factor Beta 2 (TGFB2);
[0193] (101) the pathology of the eye is associated with glaucoma and the therapeutic product is Brain Derived Neurotrophic Factor (BDNF);
[0194] (102) the pathology of the eye is associated with glaucoma and the therapeutic product is Ciliary Neurotrophic Factor (CNTF);
[0195] (103) the pathology of the eye is associated with glaucoma and the therapeutic product is Prostaglandin-Endoperoxide Synthase 2 (PTGS2);
[0196] (104) the pathology of the eye is associated with glaucoma and the therapeutic product is Prostaglandin F Receptor (PTGFR);
[0197] (105) the pathology of the eye is associated with glaucoma and the therapeutic product is a hyaluronidase;
[0198] (106) the pathology of the eye is associated with glaucoma and the therapeutic product is Pigment Epithelium-Derived Factor (PEDF);
[0199] (107) the pathology of the eye is associated with glaucoma and the therapeutic product is Vascular Endothelial Growth Factor (VEGF);
[0200] (108) the pathology of the eye is associated with glaucoma and the therapeutic product is Placental Growth Factor (PGF);
[0201] (109) the pathology of the eye is associated with glaucoma and the therapeutic product is Myocilin (MYOC);
[0202] (110) the pathology of the eye is associated with NMO and the therapeutic product is an anti-complement C5 monoclonal antibody;
[0203] (111) the pathology of the eye is associated with NMO and the therapeutic product is C-C Motif Chemokine Receptor 5 (CCR5) siRNA;
[0204] (112) the pathology of the eye is associated with NMO and the therapeutic product is an anti-CD19 monoclonal antibody;
[0205] (113) the pathology of the eye is associated with retinitis pigmentosa that is associated with rhodopsin mutations and the therapeutic product is Channelrhodopsin-1 (ChR1);
[0206] (114) the pathology of the eye is associated with retinitis pigmentosa that is associated with rhodopsin mutations and the therapeutic product is Channelrhodopsin-2 (ChR2);
[0207] (115) the pathology of the eye is associated with retinitis pigmentosa and the therapeutic product is Ciliary Neurotrophic Factor (CNTF);
[0208] (116) the pathology of the eye is associated with autosomal recessive retinitis pigmentosa and the therapeutic product is Crumbs Cell Polarity Complex Component 1 (CRB1);
[0209] (117) the pathology of the eye is associated with autosomal recessive retinitis pigmentosa and the therapeutic product is Crumbs Cell Polarity Complex Component 2 (CRB2);
[0210] (118) the pathology of the eye is associated with retinitis pigmentosa and the therapeutic product is Histone Deacetylase 4 (HDAC4);
[0211] (119) the pathology of the eye is associated with retinitis pigmentosa and the therapeutic product is Rhodopsin (RHO);
[0212] (120) the pathology of the eye is associated with retinitis pigmentosa and the therapeutic product is Nerve Growth Factor (NGF);
[0213] (121) the pathology of the eye is associated with retinitis pigmentosa and the therapeutic product is Nuclear Factor, Erythroid 2 Like 2 (NRF2);
[0214] (122) the pathology of the eye is associated with retinitis pigmentosa and the therapeutic product is Pigment Epithelium-Derived Factor (PEDF);
[0215] (123) the pathology of the eye is associated with retinitis pigmentosa and the therapeutic product is Glutathione S-Transferase PI 1 (GSTP1);
[0216] (124) the pathology of the eye is associated with retinitis pigmentosa and the therapeutic product is Rod-Derived Cone Viability Factor (RDCVF);
[0217] (125) the pathology of the eye is associated with retinitis pigmentosa and the therapeutic product is Rhodopsin (RHO);
[0218] (126) the pathology of the eye is associated with retinitis pigmentosa and the therapeutic product is Retinaldehyde Binding Protein 1 (RLBP1);
[0219] (127) the pathology of the eye is associated with Stargardt's disease and the therapeutic product is an anti-complement C5 aptamer;
[0220] (128) the pathology of the eye is associated with uveitis and the therapeutic product is Double Homeobox 4 (DUX4);
[0221] (129) the pathology of the eye is associated with uveitis and the therapeutic product is NLR Family Pyrin Domain Containing 3 (NLRP3);
[0222] (130) the pathology of the eye is associated with uveitis and the therapeutic product is Spleen Associated Tyrosine Kinase (SYK);
[0223] (131) the pathology of the eye is associated with uveitis and the therapeutic product is Adrenocorticotropic Hormone (ACTH);
[0224] (132) the pathology of the eye is associated with uveitis and the therapeutic product is Caspase 1 (CASP1);
[0225] (133) the pathology of the eye is associated with uveitis and the therapeutic product is anti-CD59 monoclonal antibody;
[0226] (134) the pathology of the eye is associated with uveitis and the therapeutic product is an anti-complement C5 aptamer;
[0227] (135) the pathology of the eye is associated with corneal neovascularization and the therapeutic product is Insulin Receptor Substrate 1 (IRS1);
[0228] (136) the pathology of the eye is associated with corneal neovascularization and the therapeutic product is NOTCH Regulated Ankyrin Repeat Protein (NRARP);
[0229] (137) the pathology of the eye is associated with diabetic retinopathy and the therapeutic product is NOTCH Regulated Ankyrin Repeat Protein (NRARP);
[0230] (138) the pathology of the eye is associated with diabetic retinopathy and the therapeutic product is Alpha-2-Antiplasmin (A2AP);
[0231] (139) the pathology of the eye is associated with diabetic retinopathy and the therapeutic product is Plasminogen (PLG);
[0232] (140) the pathology of the eye is associated with diabetic retinopathy and the therapeutic product is a growth hormone;
[0233] (141) the pathology of the eye is associated with diabetic retinopathy and the therapeutic product is Insulin Like Growth Factor 1 (IGF1);
[0234] (142) the pathology of the eye is associated with diabetic retinopathy and the therapeutic product is Interleukin 1 Beta (IL1B).
[0235] (143) the pathology of the eye is associated with diabetic retinopathy and the therapeutic product is Angiotensin I Converting Enzyme 2 (ACE2);
[0236] (144) the pathology of the eye is associated with diabetic retinopathy and the therapeutic product is IRS1;
[0237] (145) the pathology of the eye is associated with diabetic retinopathy and the therapeutic product is an anti-integrin oligopeptide;
[0238] (146) the pathology of the eye is associated with diabetic retinopathy and the therapeutic product is an anti-Placental Growth Factor (PGF) monoclonal antibody;
[0239] (147) the pathology of the eye is associated with Graves' ophthalmopathy and the therapeutic product is an anti-CD40 monoclonal antibody;
[0240] (148) the pathology of the eye is associated with Graves' ophthalmopathy and the therapeutic product is an anti-Insulin-Like Growth Factor 1 Receptor (IGF1R) monoclonal antibody;
[0241] (149) the pathology of the eye is associated with Graves' ophthalmopathy and the therapeutic product is an anti-Insulin-Like Growth Factor 2 Receptor (IGF2R) monoclonal antibody;
[0242] (150) the pathology of the eye is associated with DME and the therapeutic product is an anti-integrin oligopeptide;
[0243] (151) the pathology of the eye is associated with DME and the therapeutic product is an anti-Placental Growth Factor (PGF) monoclonal antibody;
[0244] (152) the pathology of the eye is associated with DME and the therapeutic product is RTP801 siRNA;
[0245] (153) the pathology of the eye is associated with multiple sclerosis (MS)-associated vision loss and the therapeutic product is ND1;
[0246] (154) the pathology of the eye is associated with myopia and the therapeutic product is Matrix Metalloproteinase 2 (MMP2) RNAi;
[0247] (155) the pathology of the eye is associated with X-linked recessive ocular albinism and the therapeutic product is G-Protein Coupled Receptor 143 (GPR143);
[0248] (156) the pathology of the eye is associated with oculocutaneous albinism type 1 and the therapeutic product is Tyrosinase (TYR);
[0249] (157) the pathology of the eye is associated with optic neuritis and the therapeutic product is Caspase 2 (CASP2);
[0250] (158) the pathology of the eye is associated with optic neuritis and the therapeutic product is an anti-Leucine Rich Repeat And Ig Domain Containing Protein 1 (LINGO1) monoclonal antibody; or
[0251] (159) the pathology of the eye is associated with polypoidal choroidal vasculopathy and the therapeutic product is an anti-complement C5 aptamer.

[0252] 27. The method of any one of paragraphs 1-11 and 15-18, wherein:
[0253] (1) the pathology of the eye is associated with X-linked retinitis pigmentosa (XLRP) and the therapeutic product is Retinitis Pigmentosa GTPase Regulator (RPGR);
[0254] (2) the pathology of the eye is associated with achromatopsia (ACHM) and the therapeutic product is Cyclic Nucleotide Gated Channel Beta 3 (CNGB3);
[0255] (3) the pathology of the eye is associated with achromatopsia and the therapeutic product is Cyclic Nucleotide Gated Channel Alpha 3 (CNGA3); or
[0256] (4) the pathology of the eye is associated with biallelic RPE65 mutation-associated retinal dystrophy and the therapeutic product is Retinoid Isomerohydrolase RPE65 (RPE65).

[0257] 28. The method of any one of paragraphs 1-11 and 13-18, wherein:
[0258] (1) the pathology of the eye is associated with Batten-CLN1 and the therapeutic product is Palmitoyl-Protein Thioesterase 1 (PPT1);
[0259] (2) the pathology of the eye is associated with Batten-CLN2 and the therapeutic product is Tripeptidyl-Peptidase 1 (TPP1);
[0260] (3) the pathology of the eye is associated with Batten-CLN3 and the therapeutic product is Battenin (CLN3);
[0261] (4) the pathology of the eye is associated with uveitis and the therapeutic product is an anti-Interleukin 6 (IL6) monoclonal antibody;
[0262] (5) the pathology of the eye is associated with uveitis and the therapeutic product is an anti-TNF-alpha (TNF) monoclonal antibody;
[0263] (6) the pathology of the eye is associated with diabetic macular edema (DME) and the therapeutic product is an anti-IL6 monoclonal antibody;
[0264] (7) the pathology of the eye is associated with red-green color blindness and the therapeutic product is L opsin (OPN1LW);
[0265] (8) the pathology of the eye is associated with red-green color blindness and the therapeutic product is M opsin (OPN1MW);
[0266] (9) the pathology of the eye is associated with blue cone monochromacy and the therapeutic product is M opsin (OPN1MW);
[0267] (10) the pathology of the eye is associated with Leber congenital amaurosis-1 (LCA 1) and the therapeutic product is Guanylate Cyclase 2D, Retinal (GUCY2D);
[0268] (11) the pathology of the eye is associated with Leber congenital amaurosis-2 (LCA 2) and the therapeutic product is Retinoid Isomerohydrolase RPE65 (RPE65);
[0269] (12) the pathology of the eye is associated with Leber congenital amaurosis-7 (LCA 7) and the therapeutic product is Cone-Rod Homeobox (CRX);
[0270] (13) the pathology of the eye is associated with Leber congenital amaurosis-11 (LCA 11) and the therapeutic product is Inosine Monophosphate Dehydrogenase 1 (IMPDH1);
[0271] (14) the pathology of the eye is associated with Leber congenital amaurosis-12 (LCA 12) and the therapeutic product is Retinal Degeneration 3, GUCY2D regulator (RD3);
[0272] (15) the pathology of the eye is associated with Leber congenital amaurosis-13 (LCA 13) and the therapeutic product is Retinol Dehydrogenase 12 (RDH12);
[0273] (16) the pathology of the eye is associated with Leber congenital amaurosis-15 (LCA 15) and the therapeutic product is Tubby Like Protein 1 (TULP1);
[0274] (17) the pathology of the eye is associated with Leber congenital amaurosis-16 (LCA 16) and the therapeutic product is Potassium Voltage-Gated Channel Subfamily J Member 13 (KCNJ13);
[0275] (18) the pathology of the eye is associated with Leber's hereditary optic neuropathy (LHON) and the therapeutic product is Mitochondrially Encoded NADH Dehydrogenase 1 (MT-ND1);
[0276] (19) the pathology of the eye is associated with LHON and the therapeutic product is Mitochondrially Encoded NADH Dehydrogenase 4 (MT-ND4);
[0277] (20) the pathology of the eye is associated with LHON and the therapeutic product is Mitochondrially Encoded NADH Dehydrogenase 6 (MT-ND6);
[0278] (21) the pathology of the eye is associated with neuromyelitis optica (NMO) and the therapeutic product is an anti-complement C5 monoclonal antibody;
[0279] (22) the pathology of the eye is associated with NMO and the therapeutic product is an anti-IL6 monoclonal antibody;
[0280] (23) the pathology of the eye is associated with uveitis and the therapeutic product is an anti-complement C5 monoclonal antibody;
[0281] (24) the pathology of the eye is associated with uveitis and the therapeutic product is Angiotensin I Converting Enzyme (ACE);
[0282] (25) the pathology of the eye is associated with uveitis and the therapeutic product is Interleukin 10 (IL10);
[0283] (26) the pathology of the eye is associated with uveitis and the therapeutic product is an anti-TNF monoclonal antibody;
[0284] (27) the pathology of the eye is associated with X-linked retinoschisis (XLRS) and the therapeutic product is Retinoschisin (RS1);
[0285] (28) the pathology of the eye is associated with Bardet-Biedl syndrome 1 and the therapeutic product is Bardet-Biedl Syndrome 1 (BBS1);
[0286] (29) the pathology of the eye is associated with Bardet-Biedl syndrome 3 and the therapeutic product is ADP Ribosylation Factor Like GTPase 6 (ARL6);
[0287] (30) the pathology of the eye is associated with Bardet-Biedl syndrome 5 and the therapeutic product is Bardet-Biedl Syndrome 5 (BBS5);
[0288] (31) the pathology of the eye is associated with Bardet-Biedl syndrome 6 and the therapeutic product is McKusick-Kaufman Syndrome (MKKS);
[0289] (32) the pathology of the eye is associated with Bardet-Biedl syndrome 10 and the therapeutic product is Bardet-Biedl Syndrome 10 (BBS10);
[0290] (33) the pathology of the eye is associated with Bardet-Biedl syndrome 11 and the therapeutic product is Tripartite Motif Containing 32 (TRIM32);
[0291] (34) the pathology of the eye is associated with Bardet-Biedl syndrome 13 and the therapeutic product is MKS Transition Zone Complex Subunit 1 (MKS1);
[0292] (35) the pathology of the eye is associated with Bardet-Biedl syndrome 18 and the therapeutic product is BBSome Interacting Protein 1 (BBIP1);
[0293] (36) the pathology of the eye is associated with Bardet-Biedl syndrome 19 and the therapeutic product is Intraflagellar Transport 27 (IFT27);
[0294] (37) the pathology of the eye is associated with cone dystrophy and the therapeutic product is Guanylate Cyclase Activator 1A (GUCA1A);
[0295] (38) the pathology of the eye is associated with retinitis pigmentosa 13 and the therapeutic product is Pre-mRNA Processing Factor 8 (PRPF8);
[0296] (39) the pathology of the eye is associated with retinitis pigmentosa 37 and the therapeutic product is Nuclear Receptor Subfamily 2 Group E Member 3 (NR2E3); or
[0297] (40) the pathology of the eye is associated with Best disease and the therapeutic product is Bestrophin 1 (BEST1).

[0298] 29. The method of any one of paragraphs 1-11 and 15-18, wherein:
[0299] (1) the pathology of the eye is associated with biallelic RPE65 mutation-associated retinal dystrophy and the therapeutic product is Retinoid Isomerohydrolase RPE65 (RPE65).

[0300] 30. The method of any one of paragraphs 1-11 and 13-18, wherein:
[0301] (1) the pathology of the eye is associated with Batten-CLN2 and the therapeutic product is Tripeptidyl-Peptidase 1 (TPP1);
[0302] (2) the pathology of the eye is associated with Usher's-Type 1 and the therapeutic product is Myosin VIIA (MYO7A);
[0303] (3) the pathology of the eye is associated with Usher's-Type 1 and the therapeutic product is Cadherin Related 23 (CDH23);
[0304] (4) the pathology of the eye is associated with Usher's-Type 2 and the therapeutic product is Protocadherin Related 15 (PCDH15);
[0305] (5) the pathology of the eye is associated with Usher's-Type 2 and the therapeutic product is Usherin (USH2A);
[0306] (6) the pathology of the eye is associated with Usher's-Type 3 and the therapeutic product is Clarin 1 (CLRN1);
[0307] (7) the pathology of the eye is associated with Stargardt's and the therapeutic product is ATP Binding Cassette Subfamily A Member 4 (ABCA4);
[0308] (8) the pathology of the eye is associated with Stargardt's and the therapeutic product is ELOVL Fatty Acid Elongase 4 (ELOVL4);
[0309] (9) the pathology of the eye is associated with red-green color blindness and the therapeutic product is L opsin (OPN1LW);
[0310] (10) the pathology of the eye is associated with red-green color blindness and the therapeutic product is M opsin (OPN1MW);
[0311] (11) the pathology of the eye is associated with blue cone monochromacy and the therapeutic product is M opsin (OPN1MW);
[0312] (12) the pathology of the eye is associated with Leber congenital amaurosis-1 (LCA 1) and the therapeutic product is Guanylate Cyclase 2D, Retinal (GUCY2D);
[0313] (13) the pathology of the eye is associated with Leber congenital amaurosis-2 (LCA 2) and the therapeutic product is Retinoid Isomerohydrolase RPE65 (RPE65);
[0314] (14) the pathology of the eye is associated with Leber congenital amaurosis-4 (LCA 4) and the therapeutic product is Aryl Hydrocarbon Receptor Interacting Protein Like 1 (AIPL1);
[0315] (15) the pathology of the eye is associated with Leber congenital amaurosis-7 (LCA 7) and the therapeutic product is Cone-Rod Homeobox (CRX);
[0316] (16) the pathology of the eye is associated with Leber congenital amaurosis-8 (LCA 8) and the therapeutic product is Crumbs Cell Polarity Complex Component 1 (CRB1);
[0317] (17) the pathology of the eye is associated with Leber congenital amaurosis-9 (LCA 9) and the therapeutic product is Nicotinamide Nucleotide Adenylyltransferase 1 (NMNAT1);
[0318] (18) the pathology of the eye is associated with Leber congenital amaurosis-10 (LCA 10) and the therapeutic product is Centrosomal Protein 290 (CEP290);
[0319] (19) the pathology of the eye is associated with Leber congenital amaurosis-11 (LCA 11) and the therapeutic product is Inosine Monophosphate Dehydrogenase 1 (IMPDH1);
[0320] (20) the pathology of the eye is associated with Leber congenital amaurosis-15 (LCA 15) and the therapeutic product is Tubby Like Protein 1 (TULP1);
[0321] (21) the pathology of the eye is associated with LHON and the therapeutic product is Mitochondrially Encoded NADH Dehydrogenase 4 (MT-ND4);
[0322] (22) the pathology of the eye is associated with LHON and the therapeutic product is Mitochondrially Encoded NADH Dehydrogenase 6 (MT-ND6);
[0323] (23) the pathology of the eye is associated with choroideremia and the therapeutic product is Rab Escort Protein 1 (CHM);
[0324] (24) the pathology of the eye is associated with X-linked retinoschisis (XLRS) and the therapeutic product is Retinoschisin (RS1);
[0325] (25) the pathology of the eye is associated with Bardet-Biedl syndrome 1 and the therapeutic product is Bardet-Biedl Syndrome 1 (BBS1);
[0326] (26) the pathology of the eye is associated with Bardet-Biedl syndrome 6 and the therapeutic product is McKusick-Kaufman Syndrome (MKKS);
[0327] (27) the pathology of the eye is associated with Bardet-Biedl syndrome 10 and the therapeutic product is Bardet-Biedl Syndrome 10 (BBS10);
[0328] (28) the pathology of the eye is associated with cone dystrophy and the therapeutic product is Guanylate Cyclase Activator 1A (GUCA1A);
[0329] (29) the pathology of the eye is associated with optic atrophy and the therapeutic product is OPA1 Mitochondrial Dynamin Like GTPase (OPA1);
[0330] (30) the pathology of the eye is associated with retinitis pigmentosa 1 and the therapeutic product is RP1 Axonemal Microtubule Associated (RP1);
[0331] (31) the pathology of the eye is associated with retinitis pigmentosa 2 and the therapeutic product is RP2 Activator of ARL3 GTPase (RP2);
[0332] (32) the pathology of the eye is associated with retinitis pigmentosa 7 and the therapeutic product is Peripherin 2 (PRPH2);
[0333] (33) the pathology of the eye is associated with retinitis pigmentosa 11 and the therapeutic product is Pre-mRNA Processing Factor 31(PRPF31);
[0334] (34) the pathology of the eye is associated with retinitis pigmentosa 13 and the therapeutic product is Pre-mRNA Processing Factor 8 (PRPF8);
[0335] (35) the pathology of the eye is associated with retinitis pigmentosa 37 and the therapeutic product is Nuclear Receptor Subfamily 2 Group E Member 3 (NR2E3);
[0336] (36) the pathology of the eye is associated with retinitis pigmentosa 38 and the therapeutic product is MER Proto-Oncogene, Tyrosine Kinase (MERTK);
[0337] (37) the pathology of the eye is associated with retinitis pigmentosa 40 and the therapeutic product is Phosphodiesterase 6B (PDE6B);
[0338] (38) the pathology of the eye is associated with retinitis pigmentosa 41 and the therapeutic product is Prominin 1 (PROM1);
[0339] (39) the pathology of the eye is associated with retinitis pigmentosa 56 and the therapeutic product is Interphotoreceptor Matrix Proteoglycan 2 (IMPG2);
[0340] (40) the pathology of the eye is associated with petinitis pigmentosa 62 and the therapeutic product is Male Germ Cell Associated Kinase (MAK);
[0341] (41) the pathology of the eye is associated with retinitis pigmentosa 80 and the therapeutic product is Intraflagellar Transport 140 (IFT140); or (42) the pathology of the eye is associated with Best disease and the therapeutic product is Bestrophin 1 (BEST1).

[0342] 31. The method of any one of paragraphs 1-11 and 15-18, wherein:
[0343] (1) the pathology of the eye is associated with X-linked retinitis pigmentosa (XLRP) and the therapeutic product is Retinitis Pigmentosa GTPase Regulator (RPGR);
[0344] (2) the pathology of the eye is associated with achromatopsia and the therapeutic product is Cyclic Nucleotide Gated Channel Beta 3 (CNGB3); or
[0345] (3) the pathology of the eye is associated with achromatopsia and the therapeutic product is Cyclic Nucleotide Gated Channel Alpha 3 (CNGA3).

[0346] 32. The method of any one of paragraphs 1-31, wherein the recombinant viral vector further comprises a nucleotide sequence encoding a promoter or an enhancer-promoter, which nucleotide sequence encoding the promoter or enhancer-promoter is operably linked to the nucleotide sequence encoding the therapeutic product, and wherein the promoter or enhancer-promoter is:
[0347] (1) a CAG promoter;
[0348] (2) a CBA promoter;
[0349] (3) a CMV promoter;
[0350] (4) a PR1.7 promoter;
[0351] (5) a Rhodopsin Kinase (GRK1) photoreceptor-specific enhancer-promoter;
[0352] (6) an hCARp promoter;
[0353] (7) an hRKp;
[0354] (8) a cone photoreceptor specific human arrestin 3 (ARR3) promoter;
[0355] (9) a rhodopsin promoter; or
[0356] (10) a U6 promoter.

[0357] 33. The method of any one of paragraphs 1-11 and 13-15, wherein the recombinant viral vector further comprises a nucleotide sequence encoding a cone-specific promoter, which nucleotide sequence encoding the cone-specific promoter is operably linked to the nucleotide sequence encoding the therapeutic product, and wherein:
[0358] (1) the pathology of the eye is associated with red-green color blindness and the therapeutic product is L opsin (OPN1LW);
[0359] (2) the pathology of the eye is associated with red-green color blindness and the therapeutic product is M opsin (OPN1MW);
[0360] (3) the pathology of the eye is associated with blue cone monochromacy and the therapeutic product is M opsin (OPN1MW);
[0361] (4) the pathology of the eye is associated with cone dystrophy and the therapeutic product is Guanylate Cyclase Activator 1A (GUCA1A); or
[0362] (5) the pathology of the eye is associated with blue cone monochromacy (BCM) and the therapeutic product is L opsin (OPN1LW).

[0363] 34. The method of any one of paragraphs 1-33, wherein the administering step delivers a therapeutically effective amount of the therapeutic product to the retina of said human subject.

[0364] 35. The method of paragraph 34, wherein the therapeutically effective amount of the therapeutic product is produced by human retinal cells of said human subject.

[0365] 36. The method of paragraph 34, wherein the therapeutically effective amount of the therapeutic product is produced by human photoreceptor cells, horizontal cells, bipolar cells, amacrine cells, retina ganglion cells, and/or retinal pigment epithelial cells in the external limiting membrane of said human subject.

[0366] 37. The method of paragraph 36, wherein the human photoreceptor cells are cone cells and/or rod cells.

[0367] 38. The method of paragraph 36, wherein the retina ganglion cells are midget cells, parasol cells, bistratified cells, giant retina ganglion cells, photosensitive ganglion cells, and/or Müller glia.

[0368] 39. The method of any one of paragraphs 1-38, wherein the recombinant viral vector is an rAAV vector.

[0369] 40. The method of paragraph 39, wherein the recombinant viral vector is an rAAV8 vector.

[0370] 41. The method of any one of paragraphs 1-40, which further comprises, after the administering step, a step of monitoring the post ocular injection thermal profile of the injected material in the eye using an infrared thermal camera.

[0371] 42. The method of paragraph 41, wherein the infrared thermal camera is an FLIR T530 infrared thermal camera.

[0372] 43. The method of any one of paragraphs 1-43, wherein the recombinant nucleotide expression vector is administered at a dose about 6.0×10¹⁰ genome copies per eye.

[0373] 44. The method of any one of paragraphs 1-43, wherein the recombinant nucleotide expression vector is administered at a dose about 1.6×10¹¹ genome copies per eye.

[0374] 45. The method of any one of paragraphs 1-43, wherein the recombinant nucleotide expression vector is administered at a dose about 2.5×10¹¹ genome copies per eye.

[0375] 46. The method of any one of paragraphs 1-43, wherein the recombinant nucleotide expression vector is administered at a dose about 5.0×10¹¹ genome copies per eye.

[0376] 47. The method of any one of paragraphs 1-43, wherein the recombinant nucleotide expression vector is administered at a dose about 3.0×10¹² genome copies per eye.

[0377] 4.1.2 Set 2

[0378] 1. A method for treating a pathology of the eye, comprising administering to the subretinal space in the eye of a human subject in need of treatment a recombinant viral vector comprising a nucleotide sequence encoding a therapeutic product such that the therapeutic product is expressed and results in treatment of the pathology of the eye, wherein the method does not comprise performing a vitrectomy on the eye of said human patient.

[0379] 2. The method of paragraph 1, wherein the administering step comprises administering to the subretinal space in the eye of said human subject the recombinant viral vector therapeutic product via the suprachoroidal space in the eye of said human subject.

[0380] 3. The method of paragraph 2, wherein the administering step is by the use of a subretinal drug delivery device comprising a catheter that can be inserted and tunneled through the suprachoroidal space toward the posterior pole, where a small needle injects into the subretinal space.

[0381] 4. The method of paragraph 3, wherein the administering step comprises inserting and tunneling the catheter of the subretinal drug delivery device through the suprachoroidal space.

[0382] 5. A method for treating a pathology of the eye, comprising administering to the suprachoroidal space in the eye of a human subject in need of treatment a recombinant viral vector comprising a nucleotide sequence encoding a therapeutic product such that the therapeutic product is expressed and results in treatment of the pathology of the eye.

[0383] 6. The method of paragraph 5, wherein the administering step is by injecting the recombinant viral vector into the suprachoroidal space using a suprachoroidal drug delivery device.

[0384] 7. The method of paragraph 5 or 6, wherein the suprachoroidal drug delivery device is a microinjector.

[0385] 8. A method for treating a pathology of the eye, comprising administering to the outer surface of the sclera in the eye of a human subject in need of treatment a recombinant viral vector comprising a nucleotide sequence encoding a therapeutic product such that the therapeutic product is expressed and results in treatment of the pathology of the eye.

[0386] 9. The method of paragraph 8, wherein the administering step is by the use of a juxtascleral drug delivery device that comprises a cannula whose tip can be inserted and kept in direct apposition to the scleral surface.

[0387] 10. The method of paragraph 9, wherein the administering step comprises inserting and keeping the tip of the cannula in direct apposition to the scleral surface.

[0388] 11. The method of any one of paragraphs 1-10, wherein the therapeutic product is not an anti-human vascular endothelial growth factor (hVEGF) antibody.

[0389] 12. The method of any one of paragraphs 1-11, wherein the pathology of the eye is not associated with neovascular age-related macular degeneration (nAMD).

[0390] 13. A method for treating a pathology of the eye, comprising administering to the subretinal space in the eye of a human subject in need of treatment a recombinant viral vector comprising a nucleotide sequence encoding a therapeutic product such that the therapeutic product is expressed and results in treatment of the pathology of the eye, wherein the method comprises performing a vitrectomy on the eye of said human patient, and wherein the therapeutic product is not anti-human vascular endothelial growth factor (hVEGF) antibody

[0391] 14. The method of paragraph 13, wherein the vitrectomy is a partial vitrectomy.

[0392] 15. A method for treating a pathology of the eye, comprising administering to the subretinal space peripheral to the optic disc, fovea and macula located in the back of the eye of a human subject in need of treatment a recombinant viral vector comprising a nucleotide sequence encoding a therapeutic product such that the therapeutic product is expressed and results in treatment of the pathology of the eye, wherein the method does not comprise performing a vitrectomy on the eye of said human patient.

[0393] 16. The method of paragraph 15, wherein the administering step is by transvitreal injection.

[0394] 17. The method of paragraph 16, wherein the transvitreal injection comprises inserting a sharp needle into the sclera via the superior or inferior side of the eye and passing the sharp needle all the way through the vitreous to inject the recombinant viral vector to the subretinal space on the other side.

[0395] 18. The method of paragraph 16, wherein the transvitreal injection comprises inserting a trochar into the sclera and inserting a cannula through the trochar and through the vitreous to inject the recombinant viral vector to the subretinal space on the other side

[0396] 19. The method of any one of paragraphs 15-18, wherein the therapeutic product is an anti-hVEGF antibody.

[0397] 20. The method of paragraph 19, wherein the anti-hVEGF antibody is an anti-hVEGF antigen-binding fragment.

[0398] 21. The method of paragraph 20, wherein the anti-hVEGF antigen-binding fragment is a Fab, F(ab′)₂, or single chain variable fragment (scFv).

[0399] 22. The method of any one of paragraphs 19-21, wherein the anti-hVEGF antibody comprises a heavy chain comprising the amino acid sequence of SEQ ID NO:2 or SEQ ID NO:4, and a light chain comprising the amino acid sequence of SEQ ID NO:1, or SEQ ID NO:3.

[0400] 23. The method of any one of paragraphs 19-21, wherein the anti-hVEGF antibody comprises light chain CDRs 1-3 of SEQ ID NOs:14-16 and heavy chain CDRs 1-3 of SEQ ID NOs:17-19 or SEQ ID NOs:20, 18, and 21.

[0401] 24. The method of any one of paragraphs 19-23, wherein the pathology of the eye is associated with nAMD, dry age-related macular degeneration (dry AMD), retinal vein occlusion (RVO), diabetic macular edema (DME), or diabetic retinopathy (DR).

[0402] 25. The method of any one of paragraphs 19-23, wherein the pathology of the eye is associated with nAMD.

[0403] 26. The method of any one of paragraphs 1-11 and 13-18, wherein:
[0404] (1) the pathology of the eye is associated with Batten-CLN1 and the therapeutic product is Palmitoyl-Protein Thioesterase 1 (PPT1);
[0405] (2) the pathology of the eye is associated with Batten-CLN2 and the therapeutic product is Tripeptidyl-Peptidase 1 (TPP1);
[0406] (3) the pathology of the eye is associated with Batten-CLN3 and the therapeutic product is Battenin (CLN3);
[0407] (4) the pathology of the eye is associated with Batten-CLN6 and the therapeutic product is CLN6 Transmembrane ER Protein (CLN6);
[0408] (5) the pathology of the eye is associated with Batten-CLN7 and the therapeutic product is Major Facilitator Superfamily Domain Containing 8 (MFSD8);
[0409] (6) the pathology of the eye is associated with Usher's-Type 1 and the therapeutic product is Myosin VIIA (MYO7A);
[0410] (7) the pathology of the eye is associated with Usher's-Type 1 and the therapeutic product is Cadherin Related 23 (CDH23);
[0411] (8) the pathology of the eye is associated with Usher's-Type 2 and the therapeutic product is Protocadherin Related 15 (PCDH15);
[0412] (9) the pathology of the eye is associated with Usher's-Type 2 and the therapeutic product is Usherin (USH2A);
[0413] (10) the pathology of the eye is associated with Usher's-Type 3 and the therapeutic product is Clarin 1 (CLRN1);
[0414] (11) the pathology of the eye is associated with Stargardt's and the therapeutic product is ATP Binding Cassette Subfamily A Member 4 (ABCA4);
[0415] (12) the pathology of the eye is associated with Stargardt's and the therapeutic product is ELOVL Fatty Acid Elongase 4 (ELOVL4);
[0416] (13) the pathology of the eye is associated with uveitis and the therapeutic product is an anti-Interleukin 6 (IL6) monoclonal antibody;
[0417] (14) the pathology of the eye is associated with uveitis and the therapeutic product is an anti-TNF-alpha (TNF) monoclonal antibody;
[0418] (15) the pathology of the eye is associated with diabetic macular edema (DME) and the therapeutic product is an anti-IL6 monoclonal antibody;
[0419] (16) the pathology of the eye is associated with red-green color blindness and the therapeutic product is L opsin (OPN1LW);
[0420] (17) the pathology of the eye is associated with red-green color blindness and the therapeutic product is M opsin (OPN1MW);
[0421] (18) the pathology of the eye is associated with blue cone monochromacy and the therapeutic product is M opsin (OPN1MW);
[0422] (19) the pathology of the eye is associated with Leber congenital amaurosis-1 (LCA 1) and the therapeutic product is Guanylate Cyclase 2D, Retinal (GUCY2D);
[0423] (20) the pathology of the eye is associated with Leber congenital amaurosis-2 (LCA 2) and the therapeutic product is Retinoid Isomerohydrolase RPE65 (RPE65);
[0424] (21) the pathology of the eye is associated with LCA 3 and the therapeutic product is Spermatogenesis Associated 7 (SPATA7);
[0425] (22) the pathology of the eye is associated with Leber congenital amaurosis-4 (LCA 4) and the therapeutic product is Aryl Hydrocarbon Receptor Interacting Protein Like 1 (AIPL1);
[0426] (23) the pathology of the eye is associated with Leber congenital amaurosis-5 (LCA 5) and the therapeutic product is Lebercilin (LCA5);
[0427] (24) the pathology of the eye is associated with Leber congenital amaurosis-6 (LCA 6) and the therapeutic product is RPGR Interacting Protein 1 (RPGRIP1);
[0428] (25) the pathology of the eye is associated with Leber congenital amaurosis-7 (LCA 7) and the therapeutic product is Cone-Rod Homeobox (CRX);
[0429] (26) the pathology of the eye is associated with Leber congenital amaurosis-8 (LCA 8) and the therapeutic product is Crumbs Cell Polarity Complex Component 1 (CRB1);
[0430] (27) the pathology of the eye is associated with Leber congenital amaurosis-9 (LCA 9) and the therapeutic product is Nicotinamide Nucleotide Adenylyltransferase 1 (NMNAT1);
[0431] (28) the pathology of the eye is associated with Leber congenital amaurosis-10 (LCA 10) and the therapeutic product is Centrosomal Protein 290 (CEP290);
[0432] (29) the pathology of the eye is associated with Leber congenital amaurosis-11 (LCA 11) and the therapeutic product is Inosine Monophosphate Dehydrogenase 1 (IMPDH1);
[0433] (30) the pathology of the eye is associated with Leber congenital amaurosis-12 (LCA 12) and the therapeutic product is Retinal Degeneration 3, GUCY2D regulator (RD3);
[0434] (31) the pathology of the eye is associated with Leber congenital amaurosis-13 (LCA 13) and the therapeutic product is Retinol Dehydrogenase 12 (RDH12);
[0435] (32) the pathology of the eye is associated with Leber congenital amaurosis-14 (LCA 14) and the therapeutic product is Lecithin Retinol Acyltransferase (LRAT);
[0436] (33) the pathology of the eye is associated with Leber congenital amaurosis-15 (LCA 15) and the therapeutic product is Tubby Like Protein 1 (TULP1);
[0437] (34) the pathology of the eye is associated with Leber congenital amaurosis-16 (LCA 16) and the therapeutic product is Potassium Voltage-Gated Channel Subfamily J Member 13 (KCNJ13);
[0438] (35) the pathology of the eye is associated with Leber's hereditary optic neuropathy (LHON) and the therapeutic product is Mitochondrially Encoded NADH Dehydrogenase 1 (MT-ND1);
[0439] (36) the pathology of the eye is associated with LHON and the therapeutic product is Mitochondrially Encoded NADH Dehydrogenase 4 (MT-ND4);
[0440] (37) the pathology of the eye is associated with LHON and the therapeutic product is Mitochondrially Encoded NADH Dehydrogenase 6 (MT-ND6);
[0441] (38) the pathology of the eye is associated with neuromyelitis optica (NMO) and the therapeutic product is an anti-complement C5 monoclonal antibody;
[0442] (39) the pathology of the eye is associated with NMO and the therapeutic product is an anti-IL6 monoclonal antibody;
[0443] (40) the pathology of the eye is associated with uveitis and the therapeutic product is an anti-complement C5 monoclonal antibody;
[0444] (41) the pathology of the eye is associated with uveitis and the therapeutic product is Angiotensin I Converting Enzyme (ACE);
[0445] (42) the pathology of the eye is associated with uveitis and the therapeutic product is Interleukin 10 (IL10);
[0446] (43) the pathology of the eye is associated with uveitis and the therapeutic product is an anti-TNF monoclonal antibody;
[0447] (44) the pathology of the eye is associated with choroideremia and the therapeutic product is Rab Escort Protein 1 (CHM);
[0448] (45) the pathology of the eye is associated with X-linked retinoschisis (XLRS) and the therapeutic product is Retinoschisin (RS1);
[0449] (46) the pathology of the eye is associated with Bardet-Biedl syndrome 1 and the therapeutic product is Bardet-Biedl Syndrome 1 (BBS1);
[0450] (47) the pathology of the eye is associated with Bardet-Biedl syndrome 2 and the therapeutic product is Bardet-Biedl Syndrome 2 (BBS2);
[0451] (48) the pathology of the eye is associated with Bardet-Biedl syndrome 3 and the therapeutic product is ADP Ribosylation Factor Like GTPase 6 (ARL6);
[0452] (49) the pathology of the eye is associated with Bardet-Biedl syndrome 4 and the therapeutic product is Bardet-Biedl Syndrome 4 (BBS4);
[0453] (50) the pathology of the eye is associated with Bardet-Biedl syndrome 5 and the therapeutic product is Bardet-Biedl Syndrome 5 (BBS5);
[0454] (51) the pathology of the eye is associated with Bardet-Biedl syndrome 6 and the therapeutic product is McKusick-Kaufman Syndrome (MKKS);
[0455] (52) the pathology of the eye is associated with Bardet-Biedl syndrome 7 and the therapeutic product is Bardet-Biedl Syndrome 7 (BBS7);
[0456] (53) the pathology of the eye is associated with Bardet-Biedl syndrome 8 and the therapeutic product is Tetratricopeptide Repeat Domain 8 (TTC8);
[0457] (54) the pathology of the eye is associated with Bardet-Biedl syndrome 9 and the therapeutic product is Bardet-Biedl Syndrome 9 (BBS9);
[0458] (55) the pathology of the eye is associated with Bardet-Biedl syndrome 10 and the therapeutic product is Bardet-Biedl Syndrome 10 (BBS10);
[0459] (56) the pathology of the eye is associated with Bardet-Biedl syndrome 11 and the therapeutic product is Tripartite Motif Containing 32 (TRIM32);
[0460] (57) the pathology of the eye is associated with Bardet-Biedl syndrome 12 and the therapeutic product is Bardet-Biedl Syndrome 12 (BBS12);
[0461] (58) the pathology of the eye is associated with Bardet-Biedl syndrome 13 and the therapeutic product is MKS Transition Zone Complex Subunit 1 (MKS1);
[0462] (59) the pathology of the eye is associated with Bardet-Biedl syndrome 14 and the therapeutic product is Centrosomal Protein 290 (CEP290);
[0463] (60) the pathology of the eye is associated with Bardet-Biedl syndrome 15 and the therapeutic product is WD Repeat Containing Planar Cell Polarity Effector (WDPCP);
[0464] (61) the pathology of the eye is associated with Bardet-Biedl syndrome 16 and the therapeutic product is Serologically Defined Colon Cancer Antigen 8 (SDCCAG8);
[0465] (62) the pathology of the eye is associated with Bardet-Biedl syndrome 17 and the therapeutic product is Leucine Zipper Transcription Factor Like 1 (LZTFL1);
[0466] (63) the pathology of the eye is associated with Bardet-Biedl syndrome 18 and the therapeutic product is BBSome Interacting Protein 1 (BBIP1);
[0467] (64) the pathology of the eye is associated with Bardet-Biedl syndrome 19 and the therapeutic product is Intraflagellar Transport 27 (IFT27);
[0468] (65) the pathology of the eye is associated with cone dystrophy and the therapeutic product is Guanylate Cyclase Activator 1A (GUCA1A);
[0469] (66) the pathology of the eye is associated with optic atrophy and the therapeutic product is OPA1 Mitochondrial Dynamin Like GTPase (OPA1);
[0470] (67) the pathology of the eye is associated with retinitis pigmentosa 1 and the therapeutic product is RP1 Axonemal Microtubule Associated (RP1);
[0471] (68) the pathology of the eye is associated with retinitis pigmentosa 2 and the therapeutic product is RP2 Activator of ARL3 GTPase (RP2);
[0472] (69) the pathology of the eye is associated with retinitis pigmentosa 7 and the therapeutic product is Peripherin 2 (PRPH2);
[0473] (70) the pathology of the eye is associated with retinitis pigmentosa 11 and the therapeutic product is Pre-mRNA Processing Factor 31(PRPF31);
[0474] (71) the pathology of the eye is associated with retinitis pigmentosa 12 and the therapeutic product is Crumbs Cell Polarity Complex Component 1 (CRB1);
[0475] (72) the pathology of the eye is associated with retinitis pigmentosa 13 and the therapeutic product is Pre-mRNA Processing Factor 8 (PRPF8);
[0476] (73) the pathology of the eye is associated with retinitis pigmentosa 25 and the therapeutic product is Eyes Shut Homolog (EYS);
[0477] (74) the pathology of the eye is associated with retinitis pigmentosa 28 and the therapeutic product is FAM161 Centrosomal Protein A (FAM161A);
[0478] (75) the pathology of the eye is associated with retinitis pigmentosa 37 and the therapeutic product is Nuclear Receptor Subfamily 2 Group E Member 3 (NR2E3);
[0479] (76) the pathology of the eye is associated with retinitis pigmentosa 38 and the therapeutic product is MER Proto-Oncogene, Tyrosine Kinase (MERTK);
[0480] (77) the pathology of the eye is associated with retinitis pigmentosa 40 and the therapeutic product is Phosphodiesterase 6B (PDE6B);
[0481] (78) the pathology of the eye is associated with retinitis pigmentosa 41 and the therapeutic product is Prominin 1 (PROM1);
[0482] (79) the pathology of the eye is associated with retinitis pigmentosa 43 and the therapeutic product is Phosphodiesterase 6A (PDE6A);
[0483] (80) the pathology of the eye is associated with retinitis pigmentosa 56 and the therapeutic product is Interphotoreceptor Matrix Proteoglycan 2 (IMPG2);
[0484] (81) the pathology of the eye is associated with petinitis pigmentosa 62 and the therapeutic product is Male Germ Cell Associated Kinase (MAK);
[0485] (82) the pathology of the eye is associated with retinitis pigmentosa 80 and the therapeutic product is Intraflagellar Transport 140 (IFT140);
[0486] (83) the pathology of the eye is associated with dry AMD and the therapeutic product is an anti-complement C5 monoclonal antibody;
[0487] (84) the pathology of the eye is associated with dry AMD and the therapeutic product is an anti-membrane attack complex (MAC) monoclonal antibody;
[0488] (85) the pathology of the eye is associated with dry AMD and the therapeutic product is HtrA Serine Peptidase 1 (HTRA1);
[0489] (86) the pathology of the eye is associated with Best disease and the therapeutic product is Bestrophin 1 (BEST1);
[0490] (87) the pathology of the eye is associated with dry AMD and the therapeutic product is a complement factor B anti sense oligonucleotide;
[0491] (88) the pathology of the eye is associated with dry AMD and the therapeutic product is an anti-beta-amyloid monoclonal antibody;
[0492] (89) the pathology of the eye is associated with dry AMD and the therapeutic product is CD59 glycoprotein (CD59);
[0493] (90) the pathology of the eye is associated with dry AMD and the therapeutic product is Channelrhodopsin-1 (ChR1);
[0494] (91) the pathology of the eye is associated with dry AMD and the therapeutic product is Channelrhodopsin-2 (ChR2), the light-sensitive protein discovered in Chlamydomonas reinhardtii;
[0495] (92) the pathology of the eye is associated with dry AMD and the therapeutic product is an anti-complement factor C5a aptamer;
[0496] (93) the pathology of the eye is associated with dry AMD and the therapeutic product is anti-complement factor D monoclonal antibody;
[0497] (94) the pathology of the eye is associated with age-related retinal ganglion cell (RGC) degeneration and the therapeutic product is DnaJ heat shock protein family (Hsp40) member C3 (DNAJC3);
[0498] (95) the pathology of the eye is associated with blue cone monochromacy (BCM) and the therapeutic product is L opsin (OPN1LW);
[0499] (96) the pathology of the eye is associated with glaucoma and the therapeutic product is beta-2 adrenoceptor siRNA;
[0500] (97) the pathology of the eye is associated with glaucoma and the therapeutic product is Caspase-2 (CASP2);
[0501] (98) the pathology of the eye is associated with glaucoma and the therapeutic product is Insulin Receptor Substrate 1 (IRS1);
[0502] (99) the pathology of the eye is associated with glaucoma and the therapeutic product is HIF-1 Responsive Protein RTP801 (RTP801);
[0503] (100) the pathology of the eye is associated with glaucoma and the therapeutic product is Transforming Growth Factor Beta 2 (TGFB2);
[0504] (101) the pathology of the eye is associated with glaucoma and the therapeutic product is Brain Derived Neurotrophic Factor (BDNF);
[0505] (102) the pathology of the eye is associated with glaucoma and the therapeutic product is Ciliary Neurotrophic Factor (CNTF);
[0506] (103) the pathology of the eye is associated with glaucoma and the therapeutic product is Prostaglandin-Endoperoxide Synthase 2 (PTGS2);
[0507] (104) the pathology of the eye is associated with glaucoma and the therapeutic product is Prostaglandin F Receptor (PTGFR);
[0508] (105) the pathology of the eye is associated with glaucoma and the therapeutic product is a hyaluronidase;
[0509] (106) the pathology of the eye is associated with glaucoma and the therapeutic product is Pigment Epithelium-Derived Factor (PEDF);
[0510] (107) the pathology of the eye is associated with glaucoma and the therapeutic product is Vascular Endothelial Growth Factor (VEGF);
[0511] (108) the pathology of the eye is associated with glaucoma and the therapeutic product is Placental Growth Factor (PGF);
[0512] (109) the pathology of the eye is associated with glaucoma and the therapeutic product is Myocilin (MYOC);
[0513] (110) the pathology of the eye is associated with NMO and the therapeutic product is an anti-complement C5 monoclonal antibody;
[0514] (111) the pathology of the eye is associated with NMO and the therapeutic product is C-C Motif Chemokine Receptor 5 (CCR5) siRNA;
[0515] (112) the pathology of the eye is associated with NMO and the therapeutic product is an anti-CD19 monoclonal antibody;
[0516] (113) the pathology of the eye is associated with retinitis pigmentosa that is associated with rhodopsin mutations and the therapeutic product is Channelrhodopsin-1 (ChR1);
[0517] (114) the pathology of the eye is associated with retinitis pigmentosa that is associated with rhodopsin mutations and the therapeutic product is Channelrhodopsin-2 (ChR2);
[0518] (115) the pathology of the eye is associated with retinitis pigmentosa and the therapeutic product is Ciliary Neurotrophic Factor (CNTF);
[0519] (116) the pathology of the eye is associated with autosomal recessive retinitis pigmentosa and the therapeutic product is Crumbs Cell Polarity Complex Component 1 (CRB1);
[0520] (117) the pathology of the eye is associated with autosomal recessive retinitis pigmentosa and the therapeutic product is Crumbs Cell Polarity Complex Component 2 (CRB2);
[0521] (118) the pathology of the eye is associated with retinitis pigmentosa and the therapeutic product is Histone Deacetylase 4 (HDAC4);
[0522] (119) the pathology of the eye is associated with retinitis pigmentosa and the therapeutic product is Rhodopsin (RHO);
[0523] (120) the pathology of the eye is associated with retinitis pigmentosa and the therapeutic product is Nerve Growth Factor (NGF);
[0524] (121) the pathology of the eye is associated with retinitis pigmentosa and the therapeutic product is Nuclear Factor, Erythroid 2 Like 2 (NRF2);
[0525] (122) the pathology of the eye is associated with retinitis pigmentosa and the therapeutic product is Pigment Epithelium-Derived Factor (PEDF);
[0526] (123) the pathology of the eye is associated with retinitis pigmentosa and the therapeutic product is Glutathione S-Transferase PI 1 (GSTP1);
[0527] (124) the pathology of the eye is associated with retinitis pigmentosa and the therapeutic product is Rod-Derived Cone Viability Factor (RDCVF);
[0528] (125) the pathology of the eye is associated with retinitis pigmentosa and the therapeutic product is Rhodopsin (RHO);
[0529] (126) the pathology of the eye is associated with retinitis pigmentosa and the therapeutic product is Retinaldehyde Binding Protein 1 (RLBP1);
[0530] (127) the pathology of the eye is associated with Stargardt's disease and the therapeutic product is an anti-complement C5 aptamer;
[0531] (128) the pathology of the eye is associated with uveitis and the therapeutic product is Double Homeobox 4 (DUX4);
[0532] (129) the pathology of the eye is associated with uveitis and the therapeutic product is NLR Family Pyrin Domain Containing 3 (NLRP3);
[0533] (130) the pathology of the eye is associated with uveitis and the therapeutic product is Spleen Associated Tyrosine Kinase (SYK);
[0534] (131) the pathology of the eye is associated with uveitis and the therapeutic product is Adrenocorticotropic Hormone (ACTH);
[0535] (132) the pathology of the eye is associated with uveitis and the therapeutic product is Caspase 1 (CASP1);
[0536] (133) the pathology of the eye is associated with uveitis and the therapeutic product is anti-CD59 monoclonal antibody;
[0537] (134) the pathology of the eye is associated with uveitis and the therapeutic product is an anti-complement C5 aptamer;
[0538] (135) the pathology of the eye is associated with corneal neovascularization and the therapeutic product is Insulin Receptor Substrate 1 (IRS1);
[0539] (136) the pathology of the eye is associated with corneal neovascularization and the therapeutic product is NOTCH Regulated Ankyrin Repeat Protein (NRARP);
[0540] (137) the pathology of the eye is associated with diabetic retinopathy and the therapeutic product is NOTCH Regulated Ankyrin Repeat Protein (NRARP);
[0541] (138) the pathology of the eye is associated with diabetic retinopathy and the therapeutic product is Alpha-2-Antiplasmin (A2AP);
[0542] (139) the pathology of the eye is associated with diabetic retinopathy and the therapeutic product is Plasminogen (PLG);
[0543] (140) the pathology of the eye is associated with diabetic retinopathy and the therapeutic product is a growth hormone;
[0544] (141) the pathology of the eye is associated with diabetic retinopathy and the therapeutic product is Insulin Like Growth Factor 1 (IGF1);
[0545] (142) the pathology of the eye is associated with diabetic retinopathy and the therapeutic product is Interleukin 1 Beta (IL1B).
[0546] (143) the pathology of the eye is associated with diabetic retinopathy and the therapeutic product is Angiotensin I Converting Enzyme 2 (ACE2);
[0547] (144) the pathology of the eye is associated with diabetic retinopathy and the therapeutic product is IRS1;
[0548] (145) the pathology of the eye is associated with diabetic retinopathy and the therapeutic product is an anti-integrin oligopeptide;
[0549] (146) the pathology of the eye is associated with diabetic retinopathy and the therapeutic product is an anti-Placental Growth Factor (PGF) monoclonal antibody;
[0550] (147) the pathology of the eye is associated with Graves' ophthalmopathy and the therapeutic product is an anti-CD40 monoclonal antibody;
[0551] (148) the pathology of the eye is associated with Graves' ophthalmopathy and the therapeutic product is an anti-Insulin-Like Growth Factor 1 Receptor (IGF1R) monoclonal antibody;
[0552] (149) the pathology of the eye is associated with Graves' ophthalmopathy and the therapeutic product is an anti-Insulin-Like Growth Factor 2 Receptor (IGF2R) monoclonal antibody;
[0553] (150) the pathology of the eye is associated with DME and the therapeutic product is an anti-integrin oligopeptide;
[0554] (151) the pathology of the eye is associated with DME and the therapeutic product is an anti-Placental Growth Factor (PGF) monoclonal antibody;
[0555] (152) the pathology of the eye is associated with DME and the therapeutic product is RTP801 siRNA;
[0556] (153) the pathology of the eye is associated with multiple sclerosis (MS)-associated vision loss and the therapeutic product is ND1;
[0557] (154) the pathology of the eye is associated with myopia and the therapeutic product is Matrix Metalloproteinase 2 (MMP2) RNAi;
[0558] (155) the pathology of the eye is associated with X-linked recessive ocular albinism and the therapeutic product is G-Protein Coupled Receptor 143 (GPR143);
[0559] (156) the pathology of the eye is associated with oculocutaneous albinism type 1 and the therapeutic product is Tyrosinase (TYR);
[0560] (157) the pathology of the eye is associated with optic neuritis and the therapeutic product is Caspase 2 (CASP2);
[0561] (158) the pathology of the eye is associated with optic neuritis and the therapeutic product is an anti-Leucine Rich Repeat And Ig Domain Containing Protein 1 (LINGO1) monoclonal antibody; or
[0562] (159) the pathology of the eye is associated with polypoidal choroidal vasculopathy and the therapeutic product is an anti-complement C5 aptamer.

[0563] 27. The method of any one of paragraphs 1-11 and 15-18, wherein:
[0564] (1) the pathology of the eye is associated with X-linked retinitis pigmentosa (XLRP) and the therapeutic product is Retinitis Pigmentosa GTPase Regulator (RPGR);
[0565] (2) the pathology of the eye is associated with achromatopsia (ACHM) and the therapeutic product is Cyclic Nucleotide Gated Channel Beta 3 (CNGB3);
[0566] (3) the pathology of the eye is associated with achromatopsia and the therapeutic product is Cyclic Nucleotide Gated Channel Alpha 3 (CNGA3); or
[0567] (4) the pathology of the eye is associated with biallelic RPE65 mutation-associated retinal dystrophy and the therapeutic product is Retinoid Isomerohydrolase RPE65 (RPE65).

[0568] 28. The method of any one of paragraphs 1-11 and 13-18, wherein:
[0569] (1) the pathology of the eye is associated with Batten-CLN1 and the therapeutic product is Palmitoyl-Protein Thioesterase 1 (PPT1);
[0570] (2) the pathology of the eye is associated with Batten-CLN2 and the therapeutic product is Tripeptidyl-Peptidase 1 (TPP1);
[0571] (3) the pathology of the eye is associated with Batten-CLN3 and the therapeutic product is Battenin (CLN3);
[0572] (4) the pathology of the eye is associated with uveitis and the therapeutic product is an anti-Interleukin 6 (IL6) monoclonal antibody;
[0573] (5) the pathology of the eye is associated with uveitis and the therapeutic product is an anti-TNF-alpha (TNF) monoclonal antibody;
[0574] (6) the pathology of the eye is associated with diabetic macular edema (DME) and the therapeutic product is an anti-IL6 monoclonal antibody;
[0575] (7) the pathology of the eye is associated with red-green color blindness and the therapeutic product is L opsin (OPN1LW);
[0576] (8) the pathology of the eye is associated with red-green color blindness and the therapeutic product is M opsin (OPN1MW);
[0577] (9) the pathology of the eye is associated with blue cone monochromacy and the therapeutic product is M opsin (OPN1MW);
[0578] (10) the pathology of the eye is associated with Leber congenital amaurosis-1 (LCA 1) and the therapeutic product is Guanylate Cyclase 2D, Retinal (GUCY2D);
[0579] (11) the pathology of the eye is associated with Leber congenital amaurosis-2 (LCA 2) and the therapeutic product is Retinoid Isomerohydrolase RPE65 (RPE65);
[0580] (12) the pathology of the eye is associated with Leber congenital amaurosis-7 (LCA 7) and the therapeutic product is Cone-Rod Homeobox (CRX);
[0581] (13) the pathology of the eye is associated with Leber congenital amaurosis-11 (LCA 11) and the therapeutic product is Inosine Monophosphate Dehydrogenase 1 (IMPDH1);
[0582] (14) the pathology of the eye is associated with Leber congenital amaurosis-12 (LCA 12) and the therapeutic product is Retinal Degeneration 3, GUCY2D regulator (RD3);
[0583] (15) the pathology of the eye is associated with Leber congenital amaurosis-13 (LCA 13) and the therapeutic product is Retinol Dehydrogenase 12 (RDH12);
[0584] (16) the pathology of the eye is associated with Leber congenital amaurosis-15 (LCA 15) and the therapeutic product is Tubby Like Protein 1 (TULP1);
[0585] (17) the pathology of the eye is associated with Leber congenital amaurosis-16 (LCA 16) and the therapeutic product is Potassium Voltage-Gated Channel Subfamily J Member 13 (KCNJ13);
[0586] (18) the pathology of the eye is associated with Leber's hereditary optic neuropathy (LHON) and the therapeutic product is Mitochondrially Encoded NADH Dehydrogenase 1 (MT-ND1);
[0587] (19) the pathology of the eye is associated with LHON and the therapeutic product is Mitochondrially Encoded NADH Dehydrogenase 4 (MT-ND4);
[0588] (20) the pathology of the eye is associated with LHON and the therapeutic product is Mitochondrially Encoded NADH Dehydrogenase 6 (MT-ND6);
[0589] (21) the pathology of the eye is associated with neuromyelitis optica (NMO) and the therapeutic product is an anti-complement C5 monoclonal antibody;
[0590] (22) the pathology of the eye is associated with NMO and the therapeutic product is an anti-IL6 monoclonal antibody;
[0591] (23) the pathology of the eye is associated with uveitis and the therapeutic product is an anti-complement C5 monoclonal antibody;
[0592] (24) the pathology of the eye is associated with uveitis and the therapeutic product is Angiotensin I Converting Enzyme (ACE);
[0593] (25) the pathology of the eye is associated with uveitis and the therapeutic product is Interleukin 10 (IL10);
[0594] (26) the pathology of the eye is associated with uveitis and the therapeutic product is an anti-TNF monoclonal antibody;
[0595] (27) the pathology of the eye is associated with X-linked retinoschisis (XLRS) and the therapeutic product is Retinoschisin (RS1);
[0596] (28) the pathology of the eye is associated with Bardet-Biedl syndrome 1 and the therapeutic product is Bardet-Biedl Syndrome 1 (BBS1);
[0597] (29) the pathology of the eye is associated with Bardet-Biedl syndrome 3 and the therapeutic product is ADP Ribosylation Factor Like GTPase 6 (ARL6);
[0598] (30) the pathology of the eye is associated with Bardet-Biedl syndrome 5 and the therapeutic product is Bardet-Biedl Syndrome 5 (BBS5);
[0599] (31) the pathology of the eye is associated with Bardet-Biedl syndrome 6 and the therapeutic product is McKusick-Kaufman Syndrome (MKKS);
[0600] (32) the pathology of the eye is associated with Bardet-Biedl syndrome 10 and the therapeutic product is Bardet-Biedl Syndrome 10 (BBS10);
[0601] (33) the pathology of the eye is associated with Bardet-Biedl syndrome 11 and the therapeutic product is Tripartite Motif Containing 32 (TRIM32);
[0602] (34) the pathology of the eye is associated with Bardet-Biedl syndrome 13 and the therapeutic product is MKS Transition Zone Complex Subunit 1 (MKS1);
[0603] (35) the pathology of the eye is associated with Bardet-Biedl syndrome 18 and the therapeutic product is BBSome Interacting Protein 1 (BBIP1);
[0604] (36) the pathology of the eye is associated with Bardet-Biedl syndrome 19 and the therapeutic product is Intraflagellar Transport 27 (IFT27);
[0605] (37) the pathology of the eye is associated with cone dystrophy and the therapeutic product is Guanylate Cyclase Activator 1A (GUCA1A);
[0606] (38) the pathology of the eye is associated with retinitis pigmentosa 13 and the therapeutic product is Pre-mRNA Processing Factor 8 (PRPF8);
[0607] (39) the pathology of the eye is associated with retinitis pigmentosa 37 and the therapeutic product is Nuclear Receptor Subfamily 2 Group E Member 3 (NR2E3); or
[0608] (40) the pathology of the eye is associated with Best disease and the therapeutic product is Bestrophin 1 (BEST1).

[0609] 29. The method of any one of paragraphs 1-11 and 15-18, wherein:
[0610] (1) the pathology of the eye is associated with biallelic RPE65 mutation-associated retinal dystrophy and the therapeutic product is Retinoid Isomerohydrolase RPE65 (RPE65).

[0611] 30. The method of any one of paragraphs 1-11 and 13-18, wherein:
[0612] (1) the pathology of the eye is associated with Batten-CLN2 and the therapeutic product is Tripeptidyl-Peptidase 1 (TPP1);
[0613] (2) the pathology of the eye is associated with Usher's-Type 1 and the therapeutic product is Myosin VIIA (MYO7A);
[0614] (3) the pathology of the eye is associated with Usher's-Type 1 and the therapeutic product is Cadherin Related 23 (CDH23);
[0615] (4) the pathology of the eye is associated with Usher's-Type 2 and the therapeutic product is Protocadherin Related 15 (PCDH15);
[0616] (5) the pathology of the eye is associated with Usher's-Type 2 and the therapeutic product is Usherin (USH2A);
[0617] (6) the pathology of the eye is associated with Usher's-Type 3 and the therapeutic product is Clarin 1 (CLRN1);
[0618] (7) the pathology of the eye is associated with Stargardt's and the therapeutic product is ATP Binding Cassette Subfamily A Member 4 (ABCA4);
[0619] (8) the pathology of the eye is associated with Stargardt's and the therapeutic product is ELOVL Fatty Acid Elongase 4 (ELOVL4);
[0620] (9) the pathology of the eye is associated with red-green color blindness and the therapeutic product is L opsin (OPN1LW);
[0621] (10) the pathology of the eye is associated with red-green color blindness and the therapeutic product is M opsin (OPN1MW);
[0622] (11) the pathology of the eye is associated with blue cone monochromacy and the therapeutic product is M opsin (OPN1MW);
[0623] (12) the pathology of the eye is associated with Leber congenital amaurosis-1 (LCA 1) and the therapeutic product is Guanylate Cyclase 2D, Retinal (GUCY2D);
[0624] (13) the pathology of the eye is associated with Leber congenital amaurosis-2 (LCA 2) and the therapeutic product is Retinoid Isomerohydrolase RPE65 (RPE65);
[0625] (14) the pathology of the eye is associated with Leber congenital amaurosis-4 (LCA 4) and the therapeutic product is Aryl Hydrocarbon Receptor Interacting Protein Like 1 (AIPL1);
[0626] (15) the pathology of the eye is associated with Leber congenital amaurosis-7 (LCA 7) and the therapeutic product is Cone-Rod Homeobox (CRX);
[0627] (16) the pathology of the eye is associated with Leber congenital amaurosis-8 (LCA 8) and the therapeutic product is Crumbs Cell Polarity Complex Component 1 (CRB1);
[0628] (17) the pathology of the eye is associated with Leber congenital amaurosis-9 (LCA 9) and the therapeutic product is Nicotinamide Nucleotide Adenylyltransferase 1 (NMNAT1);
[0629] (18) the pathology of the eye is associated with Leber congenital amaurosis-10 (LCA 10) and the therapeutic product is Centrosomal Protein 290 (CEP290);
[0630] (19) the pathology of the eye is associated with Leber congenital amaurosis-11 (LCA 11) and the therapeutic product is Inosine Monophosphate Dehydrogenase 1 (IMPDH1);
[0631] (20) the pathology of the eye is associated with Leber congenital amaurosis-15 (LCA 15) and the therapeutic product is Tubby Like Protein 1 (TULP1);
[0632] (21) the pathology of the eye is associated with LHON and the therapeutic product is Mitochondrially Encoded NADH Dehydrogenase 4 (MT-ND4);
[0633] (22) the pathology of the eye is associated with LHON and the therapeutic product is Mitochondrially Encoded NADH Dehydrogenase 6 (MT-ND6);
[0634] (23) the pathology of the eye is associated with choroideremia and the therapeutic product is Rab Escort Protein 1 (CHM);
[0635] (24) the pathology of the eye is associated with X-linked retinoschisis (XLRS) and the therapeutic product is Retinoschisin (RS1);
[0636] (25) the pathology of the eye is associated with Bardet-Biedl syndrome 1 and the therapeutic product is Bardet-Biedl Syndrome 1 (BBS1);
[0637] (26) the pathology of the eye is associated with Bardet-Biedl syndrome 6 and the therapeutic product is McKusick-Kaufman Syndrome (MKKS);
[0638] (27) the pathology of the eye is associated with Bardet-Biedl syndrome 10 and the therapeutic product is Bardet-Biedl Syndrome 10 (BBS10);
[0639] (28) the pathology of the eye is associated with cone dystrophy and the therapeutic product is Guanylate Cyclase Activator 1A (GUCA1A);
[0640] (29) the pathology of the eye is associated with optic atrophy and the therapeutic product is OPA1 Mitochondrial Dynamin Like GTPase (OPA1);
[0641] (30) the pathology of the eye is associated with retinitis pigmentosa 1 and the therapeutic product is RP1 Axonemal Microtubule Associated (RP1);
[0642] (31) the pathology of the eye is associated with retinitis pigmentosa 2 and the therapeutic product is RP2 Activator of ARL3 GTPase (RP2);
[0643] (32) the pathology of the eye is associated with retinitis pigmentosa 7 and the therapeutic product is Peripherin 2 (PRPH2);
[0644] (33) the pathology of the eye is associated with retinitis pigmentosa 11 and the therapeutic product is Pre-mRNA Processing Factor 31(PRPF31);
[0645] (34) the pathology of the eye is associated with retinitis pigmentosa 13 and the therapeutic product is Pre-mRNA Processing Factor 8 (PRPF8);
[0646] (35) the pathology of the eye is associated with retinitis pigmentosa 37 and the therapeutic product is Nuclear Receptor Subfamily 2 Group E Member 3 (NR2E3);
[0647] (36) the pathology of the eye is associated with retinitis pigmentosa 38 and the therapeutic product is MER Proto-Oncogene, Tyrosine Kinase (MERTK);
[0648] (37) the pathology of the eye is associated with retinitis pigmentosa 40 and the therapeutic product is Phosphodiesterase 6B (PDE6B);
[0649] (38) the pathology of the eye is associated with retinitis pigmentosa 41 and the therapeutic product is Prominin 1 (PROM1);
[0650] (39) the pathology of the eye is associated with retinitis pigmentosa 56 and the therapeutic product is Interphotoreceptor Matrix Proteoglycan 2 (IMPG2);
[0651] (40) the pathology of the eye is associated with petinitis pigmentosa 62 and the therapeutic product is Male Germ Cell Associated Kinase (MAK);
[0652] (41) the pathology of the eye is associated with retinitis pigmentosa 80 and the therapeutic product is Intraflagellar Transport 140 (IFT140); or
[0653] (42) the pathology of the eye is associated with Best disease and the therapeutic product is Bestrophin 1 (BEST1).

[0654] 31. The method of any one of paragraphs 1-11 and 15-18, wherein:
[0655] (1) the pathology of the eye is associated with X-linked retinitis pigmentosa (XLRP) and the therapeutic product is Retinitis Pigmentosa GTPase Regulator (RPGR);
[0656] (2) the pathology of the eye is associated with achromatopsia and the therapeutic product is Cyclic Nucleotide Gated Channel Beta 3 (CNGB3); or
[0657] (3) the pathology of the eye is associated with achromatopsia and the therapeutic product is Cyclic Nucleotide Gated Channel Alpha 3 (CNGA3).

[0658] 32. The method of any one of paragraphs 1-31, wherein the recombinant viral vector further comprises a nucleotide sequence encoding a promoter or an enhancer-promoter, which nucleotide sequence encoding the promoter or enhancer-promoter is operably linked to the nucleotide sequence encoding the therapeutic product, and wherein the promoter or enhancer-promoter is:
[0659] (1) a CAG promoter;
[0660] (2) a CBA promoter;
[0661] (3) a CMV promoter;
[0662] (4) a PR1.7 promoter;
[0663] (5) a Rhodopsin Kinase (GRK1) photoreceptor-specific enhancer-promoter;
[0664] (6) an hCARp promoter;
[0665] (7) an hRKp;
[0666] (8) a cone photoreceptor specific human arrestin 3 (ARR3) promoter;
[0667] (9) a rhodopsin promoter; or
[0668] (10) a U6 promoter.

[0669] 33. The method of any one of paragraphs 1-11 and 13-15, wherein the recombinant viral vector further comprises a nucleotide sequence encoding a cone-specific promoter, which nucleotide sequence encoding the cone-specific promoter is operably linked to the nucleotide sequence encoding the therapeutic product, and wherein:
[0670] (1) the pathology of the eye is associated with red-green color blindness and the therapeutic product is L opsin (OPN1LW);
[0671] (2) the pathology of the eye is associated with red-green color blindness and the therapeutic product is M opsin (OPN1MW);
[0672] (3) the pathology of the eye is associated with blue cone monochromacy and the therapeutic product is M opsin (OPN1MW);
[0673] (4) the pathology of the eye is associated with cone dystrophy and the therapeutic product is Guanylate Cyclase Activator 1A (GUCA1A); or
[0674] (5) the pathology of the eye is associated with blue cone monochromacy (BCM) and the therapeutic product is L opsin (OPN1LW).

[0675] 34. The method of any one of paragraphs 1-33, wherein the administering step delivers a therapeutically effective amount of the therapeutic product to the retina of said human subject.

[0676] 35. The method of paragraph 34, wherein the therapeutically effective amount of the therapeutic product is produced by human retinal cells of said human subject.

[0677] 36. The method of paragraph 34, wherein the therapeutically effective amount of the therapeutic product is produced by human photoreceptor cells, horizontal cells, bipolar cells, amacrine cells, retina ganglion cells, and/or retinal pigment epithelial cells in the external limiting membrane of said human subject.

[0678] 37. The method of paragraph 36, wherein the human photoreceptor cells are cone cells and/or rod cells.

[0679] 38. The method of paragraph 36, wherein the retina ganglion cells are midget cells, parasol cells, bistratified cells, giant retina ganglion cells, photosensitive ganglion cells, and/or Müller glia.

[0680] 39. The method of any one of paragraphs 1-38, wherein the recombinant viral vector is an rAAV vector.

[0681] 40. The method of paragraph 39, wherein the recombinant viral vector is an rAAV8 vector.

[0682] 41. The method of any one of paragraphs 1-40, which further comprises, after the administering step, a step of monitoring the post ocular injection thermal profile of the injected material in the eye using an infrared thermal camera.

[0683] 42. The method of paragraph 41, wherein the infrared thermal camera is an FLIR T530 infrared thermal camera. 43. The method of any one of paragraphs 1-43, wherein the recombinant nucleotide expression vector is administered at a dose about 6.0×10¹⁰ genome copies per eye.

[0684] 44. The method of any one of paragraphs 1-43, wherein the recombinant nucleotide expression vector is administered at a dose about 1.6×10¹¹ genome copies per eye.

[0685] 45. The method of any one of paragraphs 1-43, wherein the recombinant nucleotide expression vector is administered at a dose about 2.5×10¹¹ genome copies per eye.

[0686] 46. The method of any one of paragraphs 1-43, wherein the recombinant nucleotide expression vector is administered at a dose about 5.0×10¹¹ genome copies per eye.

[0687] 47. The method of any one of paragraphs 1-43, wherein the recombinant nucleotide expression vector is administered at a dose about 3.0×10¹² genome copies per eye.

### 5. BRIEF DESCRIPTION OF THE DRAWINGS

[0688] FIG. 1. A suprachoroidal drug delivery device manufactured by Clearside® Biomedical, Inc.

[0689] FIG. 2. A subretinal drug delivery device comprising a catheter that can be inserted and tunneled through the suprachoroidal space toward the posterior pole, where a small needle injects into the subretinal space, manufactured by Janssen Pharmaceuticals, Inc.

[0690] FIG. 3. Diagram of the human eye with cross-sectional view.

[0691] FIGS. 4A-4D. Illustration of the posterior juxtascleral depot procedure.

[0692] FIG. 5. Schematic of AAV8-antiVEGFfab genome.

[0693] FIG. 6. Use of an infrared thermal camera to monitor thermal profile post suprachoroidal injection.

[0694] FIGS. 7A and 7B. A micro volume injector drug delivery device manufactured by Altaviz.

[0695] FIGS. 8A and 8B. A drug delivery device manufactured by Visionisti OY. Specifically, FIG. 8A depicts the injection adapter, which is able to convert 30 g short hypodermic needles into a suprachoroidal/subretinal needles. The device is able to control the length of the needle tip exposed from the distal tip of the adapter. Adjustments can be made at 10 μL. The device has the ability to adjust for suprachoroidal delivery and/or ab-externo subretinal delivery. FIG. 8B depicts a needle adaptor guide which is able to keep the lids open and hold the needle at the optimal angle and depth for delivery. The needle adapter is locked into the stabilizing device. The needle adapter is an all-in-one tool for standardized and optimized in-office suprachoroidal and/or subretinal injections.

### 6. DETAILED DESCRIPTION OF THE INVENTION

[0696] Provided herein are compositions and methods for the delivery of therapeutic products (such as therapeutic proteins (for example, antibodies), therapeutic RNAs (for example, shRNAs, siRNAs, and miRNAs), and therapeutic aptamers) to the retina/vitreal humour in the eyes of human subjects to treat pathologies of the eye, involving, for example, recombinant viral vectors such as recombinant adeno-associated virus (rAAV) vectors.

[0697] The therapeutic products can be, for example, therapeutic proteins (for example, antibodies), therapeutic RNAs (for example, shRNAs, siRNAs, and miRNAs), or therapeutic aptamers.

[0698] In a specific embodiment, the therapeutic products is a human protein or an antibody against a human protein. Antibodies include, but are not limited to, monoclonal antibodies, polyclonal antibodies, recombinantly produced antibodies, human antibodies, humanized antibodies, chimeric antibodies, synthetic antibodies, tetrameric antibodies comprising two heavy chain and two light chain molecules, antibody light chain monomers, antibody heavy chain monomers, antibody light chain dimers, antibody heavy chain dimers, antibody light chain-heavy chain pairs, intrabodies, heteroconjugate antibodies, monovalent antibodies, antigen-binding fragments of full-length antibodies, and fusion proteins of the above. Such antigen-binding fragments include, but are not limited to, single-domain antibodies (variable domain of heavy chain antibodies (VHHs) or nanobodies), Fabs, F(ab′)₂s, and scFvs (single-chain variable fragments). In certain embodiment, the therapeutic product (for example, a therapeutic protein) is post-translationally modified. In a specific embodiment, the post-translational modification is specific to the cell type, to which the therapeutic product (for example, a therapeutic protein) is delivered using a specific route as described herein. Delivery may be accomplished via gene therapy—e.g., by administering a recombinant viral vector or a recombinant DNA expression construct (collectively, a “recombinant vector”) encoding an therapeutic product to the suprachoroidal space, subretinal space (with vitrectomy, or without vitrectomy (e.g., with a catheter through the suprachoroidal space, or via peripheral injection), intraretinal space, vitreous cavity, and/or outer surface of the sclera (i.e., juxtascleral administration) in the eye(s) of a human patient, to create a permanent depot in the eye that continuously supplies the therapeutic product (e.g., a post-translationally modified therapeutic product).

[0699] 6.1 Methods for the Delivery of Therapeutic Products

[0700] In one aspect, provided herein is a method of subretinal administration without vitrectomy for treating a pathology of the eye, comprising administering to the subretinal space in the eye of a human subject in need of treatment a recombinant viral vector comprising a nucleotide sequence encoding a therapeutic product such that the therapeutic product is expressed and results in treatment of the pathology of the eye, wherein the method does not comprise performing a vitrectomy on the eye of said human patient. In certain embodiments, the administering step comprises administering to the subretinal space in the eye of said human subject the recombinant viral vector therapeutic product via the suprachoroidal space in the eye of said human subject. In certain embodiments, the administering step is by the use of a subretinal drug delivery device comprising a catheter that can be inserted and tunneled through the suprachoroidal space toward the posterior pole, where a small needle injects into the subretinal space. In certain embodiments, the administering step comprises inserting and tunneling the catheter of the subretinal drug delivery device through the suprachoroidal space.

[0701] In another aspect, provided herein is a method for treating a pathology of the eye, comprising administering to the subretinal space in the eye of a human subject in need of treatment a recombinant viral vector comprising a nucleotide sequence encoding a therapeutic product such that the therapeutic product is expressed and results in treatment of the pathology of the eye, wherein the method does not comprise performing a vitrectomy on the eye of said human patient. In certain embodiments, the administering step comprises administering to the subretinal space in the eye of said human subject the recombinant viral vector therapeutic product via the suprachoroidal space in the eye of said human subject. In certain embodiments, the administering step is by the use of a subretinal drug delivery device comprising a catheter that can be inserted and tunneled through the suprachoroidal space toward the posterior pole, where a small needle injects into the subretinal space. In certain embodiments, the administering step comprises inserting and tunneling the catheter of the subretinal drug delivery device through the suprachoroidal space.

[0702] In one aspect, provided herein is a method of subretinal administration with vitrectomy for treating a pathology of the eye, comprising administering to the subretinal space in the eye of a human subject in need of treatment a recombinant viral vector comprising a nucleotide sequence encoding a therapeutic product such that the therapeutic product is expressed and results in treatment of the pathology of the eye, wherein the method comprises performing a vitrectomy on the eye of said human patient. In certain embodiments, the vitrectomy is a partial vitrectomy.

[0703] In another aspect, provided herein is a method for treating a pathology of the eye, comprising administering to the subretinal space in the eye of a human subject in need of treatment a recombinant viral vector comprising a nucleotide sequence encoding a therapeutic product such that the therapeutic product is expressed and results in treatment of the pathology of the eye, wherein the method comprises performing a vitrectomy on the eye of said human patient. In certain embodiments, the vitrectomy is a partial vitrectomy.

[0704] In one aspect, provided herein is a method of suprachoroidal administration for treating a pathology of the eye, comprising administering to the suprachoroidal space in the eye of a human subject in need of treatment a recombinant viral vector comprising a nucleotide sequence encoding a therapeutic product such that the therapeutic product is expressed and results in treatment of the pathology of the eye. In certain embodiments, the administering step is by injecting the recombinant viral vector into the suprachoroidal space using a suprachoroidal drug delivery device. In certain embodiments, the suprachoroidal drug delivery device is a microinjector.

[0705] In another aspect, provided herein is a method for treating a pathology of the eye, comprising administering to the suprachoroidal space in the eye of a human subject in need of treatment a recombinant viral vector comprising a nucleotide sequence encoding a therapeutic product such that the therapeutic product is expressed and results in treatment of the pathology of the eye. In certain embodiments, the administering step is by injecting the recombinant viral vector into the suprachoroidal space using a suprachoroidal drug delivery device. In certain embodiments, the suprachoroidal drug delivery device is a microinjector.

[0706] In certain embodiments, delivery to the subretinal or suprachoroidal space can be performed using the methods and/or devices described and disclosed in International Publication Nos. WO 2016/042162, WO 2017/046358, WO 2017/158365, and WO 2017/158366, each of which is incorporated by reference in its entirety.

[0707] In one aspect, provided herein is a method of administration to the outer space of the sclera for treating a pathology of the eye, comprising administering to the outer surface of the sclera in the eye of a human subject in need of treatment a recombinant viral vector comprising a nucleotide sequence encoding a therapeutic product such that the therapeutic product is expressed and results in treatment of the pathology of the eye. In certain embodiments, the administering step is by the use of a juxtascleral drug delivery device that comprises a cannula whose tip can be inserted and kept in direct apposition to the scleral surface. In certain embodiments, the administering step comprises inserting and keeping the tip of the cannula in direct apposition to the scleral surface.

[0708] In another aspect, provided herein is a method for treating a pathology of the eye, comprising administering to the outer surface of the sclera in the eye of a human subject in need of treatment a recombinant viral vector comprising a nucleotide sequence encoding a therapeutic product such that the therapeutic product is expressed and results in treatment of the pathology of the eye. In certain embodiments, the administering step is by the use of a juxtascleral drug delivery device that comprises a cannula whose tip can be inserted and kept in direct apposition to the scleral surface. In certain embodiments, the administering step comprises inserting and keeping the tip of the cannula in direct apposition to the scleral surface

[0709] In one aspect, provided herein is a method of intravitreal administration for treating a pathology of the eye, comprising administering to the vitreous cavity in the eye of a human subject in need of treatment a recombinant viral vector comprising a nucleotide sequence encoding a therapeutic product such that the therapeutic product is expressed and results in treatment of the pathology of the eye. In certain embodiments, the administering step is by injecting the recombinant viral vector into the vitreous cavity using an intravitreal drug delivery device. In certain embodiments, the intravitreal drug delivery device is a microinjector. In another aspect, provided herein is a method for treating a pathology of the eye, comprising administering to the vitreous cavity in the eye of a human subject in need of treatment a recombinant viral vector comprising a nucleotide sequence encoding a therapeutic product such that the therapeutic product is expressed and results in treatment of the pathology of the eye. In certain embodiments, the administering step is by injecting the recombinant viral vector into the vitreous cavity using an intravitreal drug delivery device. In certain embodiments, the intravitreal drug delivery device is a microinjector.

[0710] In certain embodiments, the therapeutic product is not an anti-human vascular endothelial growth factor (hVEGF) antibody.

[0711] In certain embodiments, the pathology of the eye is not associated with neovascular age-related macular degeneration (nAMD) (also known as the “wet,” neovascular form of AMD (“WAMD” or “wet AMD”)).

[0712] In certain embodiments, the therapeutic product is an anti-hVEGF antibody.

[0713] In certain embodiments, the pathology of the eye is associated with nAMD.

[0714] In certain embodiments, the pathology of the eye is associated with nAMD and the therapeutic product is an anti-hVEGF antibody.

[0715] In one aspect, provided herein is a method of subretinal administration accompanied by vitrectomy for treating a pathology of the eye, comprising administering to the subretinal space in the eye of a human subject in need of treatment a recombinant viral vector comprising a nucleotide sequence encoding a therapeutic product such that the therapeutic product is expressed and results in treatment of the pathology of the eye, wherein the method comprises performing a vitrectomy on the eye of said human patient, and wherein the therapeutic product is not anti-human vascular endothelial growth factor (hVEGF) antibody. In certain embodiments, the pathology of the eye is an ocular disease or a disease involving multiple organs including the eye. In certain embodiments, the vitrectomy is a partial vitrectomy.

[0716] In another aspect, provided herein is a method for treating a pathology of the eye, comprising administering to the subretinal space in the eye of a human subject in need of treatment a recombinant viral vector comprising a nucleotide sequence encoding a therapeutic product such that the therapeutic product is expressed and results in treatment of the pathology of the eye, wherein the method comprises performing a vitrectomy on the eye of said human patient, and wherein the therapeutic product is not anti-human vascular endothelial growth factor (hVEGF) antibody. In certain embodiments, the pathology of the eye is an ocular disease or a disease involving multiple organs including the eye. In certain embodiments, the vitrectomy is a partial vitrectomy.

[0717] In one aspect, provided herein is a method of subretinal administration for treating a pathology of the eye, comprising administering to the subretinal space peripheral to the optic disc, fovea and macula located in the back of the eye of a human subject in need of treatment a recombinant viral vector comprising a nucleotide sequence encoding a therapeutic product such that the therapeutic product is expressed and results in treatment of the pathology of the eye, wherein the method does not comprise performing a vitrectomy on the eye of said human patient. In certain embodiments, the injecting step is by transvitreal injection. In certain embodiments, the method of transvitreal administration results in uniform expression of the therapeutic product throughout the eye (e.g. the expression level at the site of injection varies by less than 5%, 10%, 20%, 30%, 40%, or 50% as compared to the expression level at other areas of the eye). In certain embodiments, the transvitreal injection comprises inserting a sharp needle into the sclera via the superior or inferior side of the eye and passing the sharp needle all the way through the vitreous to inject the recombinant viral vector to the subretinal space on the other side. In certain embodiments, a needle is inserted at the 2 or 10 o'clock position. In certain embodiments, the transvitreal injection comprises inserting a trochar into the sclera and inserting a cannula through the trochar and through the vitreous to inject the recombinant viral vector to the subretinal space on the other side. In certain embodiments, the therapeutic product is an anti-hVEGF antibody. In certain embodiments, the anti-hVEGF antibody is an anti-hVEGF antigen-binding fragment. In certain embodiments, the anti-hVEGF antigen-binding fragment is a Fab, F(ab′)₂, or single chain variable fragment (scFv). In certain embodiments, the anti-hVEGF antibody comprises a heavy chain comprising the amino acid sequence of SEQ ID NO:2 or SEQ ID NO:4, and a light chain comprising the amino acid sequence of SEQ ID NO:1, or SEQ ID NO:3. In certain embodiments, wherein the anti-hVEGF antibody comprises light chain CDRs 1-3 of SEQ ID NOs:14-16 and heavy chain CDRs 1-3 of SEQ ID NOs:17-19 or SEQ ID NOs:20, 18, and 21. In certain embodiments, wherein the pathology of the eye is associated with nAMD, dry age-related macular degeneration (dry AMD), retinal vein occlusion (RVO), diabetic macular edema (DME), or diabetic retinopathy (DR). In certain embodiments, the pathology of the eye is associated with nAMD.

[0718] In another aspect, provided herein is a method for treating a pathology of the eye, comprising administering to the subretinal space peripheral to the optic disc, fovea and macula located in the back of the eye of a human subject in need of treatment a recombinant viral vector comprising a nucleotide sequence encoding a therapeutic product such that the therapeutic product is expressed and results in treatment of the pathology of the eye, wherein the method does not comprise performing a vitrectomy on the eye of said human patient. In certain embodiments, the injecting step is by transvitreal injection. In certain embodiments, the method of transvitreal administration results in uniform expression of the therapeutic product throughout the eye (e.g. the expression level at the site of injection varies by less than 5%, 10%, 20%, 30%, 40%, or 50% as compared to the expression level at other areas of the eye). In certain embodiments, the transvitreal injection comprises inserting a sharp needle into the sclera via the superior or inferior side of the eye and passing the sharp needle all the way through the vitreous to inject the recombinant viral vector to the subretinal space on the other side. In certain embodiments, a needle is inserted at the 2 or 10 o'clock position. In certain embodiments, the transvitreal injection comprises inserting a trochar into the sclera and inserting a cannula through the trochar and through the vitreous to inject the recombinant viral vector to the subretinal space on the other side. In certain embodiments, the therapeutic product is an anti-hVEGF antibody. In certain embodiments, the anti-hVEGF antibody is an anti-hVEGF antigen-binding fragment. In certain embodiments, the anti-hVEGF antigen-binding fragment is a Fab, F(ab′)₂, or single chain variable fragment (scFv). In certain embodiments, the anti-hVEGF antibody comprises a heavy chain comprising the amino acid sequence of SEQ ID NO:2 or SEQ ID NO:4, and a light chain comprising the amino acid sequence of SEQ ID NO:1, or SEQ ID NO:3. In certain embodiments, wherein the anti-hVEGF antibody comprises light chain CDRs 1-3 of SEQ ID NOs:14-16 and heavy chain CDRs 1-3 of SEQ ID NOs:17-19 or SEQ ID NOs:20, 18, and 21. In certain embodiments, wherein the pathology of the eye is associated with nAMD, dry age-related macular degeneration (dry AMD), retinal vein occlusion (RVO), diabetic macular edema (DME), or diabetic retinopathy (DR). In certain embodiments, the pathology of the eye is associated with nAMD.

[0719] In certain embodiments of the methods described herein, the administering step delivers a therapeutically effective amount of the therapeutic product to the retina of said human subject.

[0720] In certain embodiments of the methods described herein, the therapeutically effective amount of the therapeutic product is produced by human retinal cells of said human subject.

[0721] In certain embodiments of the methods described herein, the therapeutically effective amount of the therapeutic product is produced by human photoreceptor cells, horizontal cells, bipolar cells, amacrine cells, retina ganglion cells, and/or retinal pigment epithelial cells in the external limiting membrane of said human subject.

[0722] In certain embodiments of the methods described herein, the human photoreceptor cells are cone cells and/or rod cells.

[0723] In certain embodiments of the methods described herein, the retina ganglion cells are midget cells, parasol cells, bistratified cells, giant retina ganglion cells, photosensitive ganglion cells, and/or Müllner glia.

[0724] In certain embodiments of the methods described herein, the recombinant viral vector is an rAAV vector (e.g., an rAAV8, rAAV2, rAAV2tYF, or rAAV5 vector).

[0725] In certain embodiments of the methods described herein, wherein the recombinant viral vector is an rAAV8 vector.

[0726] In certain embodiments of the methods described herein, delivering to the eye comprises delivering to the retina, choroid, and/or vitreous humor of the eye.

[0727] 6.1.1 Post-Translational Modification

[0728] In certain embodiments, the therapeutic product (for example, a therapeutic protein) is post-translationally modified. In a specific embodiment, the post-translational modification is specific to the cell type, to which the therapeutic product (for example, a therapeutic protein) is delivered using a specific route as described herein.

[0729] In a specific embodiment, the post-translational modification is glycosylation. In another specific embodiment, the post-translational modification is tyrosine sulfation. In another specific embodiment, the post-translational modification is a phosphorylation. In another specific embodiment, the post-translational modification is a ADP-ribosylation. In another specific embodiment, the post-translational modification is a prenylation. In another specific embodiment, the post-translational modification is a myristoylation or palmitylation. In another specific embodiment, the post-translational modification is ubiquitination. In another specific embodiment, the post-translational modification is sentrinization. In another specific embodiment, the post-translational modification is a ubiquitination-like protein modification.

[0730] In a specific embodiment, the therapeutic product is post-translationally modified upon expression from the recombinant vector in a human immortalized retina-derived cell.

[0731] In a specific embodiment, the administration of the recombinant vector results in the formation of a depot that releases the therapeutic product containing a post-translational modification.

[0732] In a specific embodiment, the recombinant vector, when used to transduce a retina-derived cell in culture results in production of the therapeutic product containing a post-translational modification.

[0733] The post-translational modification can be detected by any method known in the art for detecting post-translational modifications, for example, western blot, chromatography, or flow cytometry.

[0734] In a specific embodiment, the post-translation can be detected by in vivo labeling of cellular substrate pools with radioactive substrate or substrate precursor molecules, which result in incorporation of radiolabeled moieties, including, but not limited to, phosphate, fatty acyl (e.g. myristoyl, or palmityl), sentrin, methyl, acetyl, hydroxyl, iodine, flavin, ubiquitin or ADP-ribosyls, to therapeutic product. Analysis of modified proteins is typically performed by electrophoresis and autoradiography, with specificity enhanced by immunoprecipitation of proteins of interest prior to electrophoresis.

[0735] In a specific embodiment, the post-translation can be detected by enzymatic incorporation of a labeled moiety (including, but not limited to, radioactive, luminescent, or fluorescent label) into a therapeutic product in vitro to estimate the state of modification in vivo.

[0736] In a specific embodiment, the post-translation can be detected by analyzing the alteration in electrophoretic mobility of modified therapeutic product (e.g., glycosylated or ubiquitinated) compared with unmodified therapeutic product.

[0737] In a specific embodiment, the post-translation can be detected by thin-layer chromatography of radiolabeled fatty acids extracted from the therapeutic product.

[0738] In a specific embodiment, the post-translation can be detected by partitioning of therapeutic product into detergent-rich or detergent layer by phase separation, and the effects of enzyme treatment of the therapeutic product on the partitioning between aqueous and detergent-rich environments.

[0739] In a specific embodiment, the post-translation can be detected by antibody recognition of the modified form of the protein, e.g., by western blot, or flow cytometry.

[0740] 6.1.2 Constructs and Formulations

[0741] For use in the methods provided herein are recombinant viral vectors or other recombinant DNA expression constructs (collectively, “recombinant vectors”) encoding an therapeutic product. The recombinant viral vectors and other DNA expression constructs provided herein include any suitable ones for delivery of therapeutic products (such as therapeutic proteins (for example, antibodies), therapeutic RNAs (for example, shRNAs, siRNAs, and miRNAs), and therapeutic aptamers)) to a target cell (e.g., retinal pigment epithelial cells). The means of delivery of a therapeutic product include recombinant viral vectors, liposomes, other lipid-containing complexes, other macromolecular complexes, synthetic modified mRNA, unmodified mRNA, small molecules, non-biologically active molecules (e.g., gold particles), polymerized molecules (e.g., dendrimers), naked DNA, plasmids, phages, transposons, cosmids, or episomes. In some embodiments, the vector is a targeted vector, e.g., a vector targeted to retinal pigment epithelial cells.

[0742] In some aspects, the disclosure provides for a nucleic acid for use, wherein the nucleic acid encodes a therapeutic product operatively linked to a promoter or enhancer-promoter described herein.

[0743] In certain embodiments, provided herein are recombinant vectors that comprise one or more nucleic acids (e.g. polynucleotides). The nucleic acids may comprise DNA, RNA, or a combination of DNA and RNA. In certain embodiments, the DNA comprises one or more of the sequences selected from the group consisting of promoter sequences, the sequence encoding the therapeutic product of interest, untranslated regions, and termination sequences. In certain embodiments, recombinant vectors provided herein comprise a promoter operably linked to the sequence encoding the therapeutic product of interest.

[0744] In certain embodiments, nucleic acids (e.g., polynucleotides) and nucleic acid sequences disclosed herein may be codon-optimized, for example, via any codon-optimization technique known to one of skill in the art (see, e.g., review by Quax et al., 2015, Mol Cell 59:149-161).

### (a) mRNA

[0745] In certain embodiments, the recombinant vectors provided herein comprise modified mRNA encoding for the therapeutic product of interest. The synthesis of modified and unmodified mRNA for delivery of a therapeutic product to cells of the eye, for example, to retinal pigment epithelial cells, is taught, for example, in Hansson et al., J. Biol. Chem., 2015, 290(9):5661-5672, which is incorporated by reference herein in its entirety. In certain embodiments, provided herein is a modified mRNA encoding for a therapeutic product moiety.

### (b) shRNAs, siRNAs, and miRNAs

[0746] In certain embodiments, the recombinant vectors provided herein comprise a nucleotide sequence encoding for a therapeutic product that is an shRNA, siRNA, or miRNA.

### (c) Recombinant Viral Vectors

[0747] Recombinant viral vectors include recombinant adenovirus, adeno-associated virus (AAV, e.g., AAV1, AAV2, AAV2tYF, AAV3, AAV4, AAV5, AAV6, AAV7, AAV8, AAV9, AAV10, AAV11, and AAVrh10), lentivirus, helper-dependent adenovirus, herpes simplex virus, poxvirus, hemagglutinin virus of Japan (HVJ), alphavirus, vaccinia virus, and retrovirus vectors. Retroviral vectors include murine leukemia virus (MLV)- and human immunodeficiency virus (HIV)-based vectors. Alphavirus vectors include semliki forest virus (SFV) and sindbis virus (SIN). In certain embodiments, the recombinant viral vectors provided herein are altered such that they are replication-deficient in humans. In certain embodiments, the recombinant viral vectors are hybrid vectors, e.g., an AAV vector placed into a “helpless” adenoviral vector. In certain embodiments, provided herein are recombinant viral vectors comprising a viral capsid from a first virus and viral envelope proteins from a second virus. In specific embodiments, the second virus is vesicular stomatitus virus (VSV). In more specific embodiments, the envelope protein is VSV-G protein.

[0748] In certain embodiments, the recombinant viral vectors provided herein are HIV based viral vectors. In certain embodiments, HIV-based vectors provided herein comprise at least two polynucleotides, wherein the gag and pol genes are from an HIV genome and the env gene is from another virus.

[0749] In certain embodiments, the recombinant viral vectors provided herein are herpes simplex virus-based viral vectors. In certain embodiments, herpes simplex virus-based vectors provided herein are modified such that they do not comprise one or more immediately early (IE) genes, rendering them non-cytotoxic.

[0750] In certain embodiments, the recombinant viral vectors provided herein are MLV based viral vectors. In certain embodiments, MLV-based vectors provided herein comprise up to 8 kb of heterologous DNA in place of the viral genes.

[0751] In certain embodiments, the recombinant viral vectors provided herein are lentivirus-based viral vectors. In certain embodiments, lentiviral vectors provided herein are derived from human lentiviruses. In certain embodiments, lentiviral vectors provided herein are derived from non-human lentiviruses. In certain embodiments, lentiviral vectors provided herein are packaged into a lentiviral capsid. In certain embodiments, lentiviral vectors provided herein comprise one or more of the following elements: long terminal repeats, a primer binding site, a polypurine tract, att sites, and an encapsidation site.

[0752] In certain embodiments, the recombinant viral vectors provided herein are alphavirus-based viral vectors. In certain embodiments, alphavirus vectors provided herein are recombinant, replication-defective alphaviruses. In certain embodiments, alphavirus replicons in the alphavirus vectors provided herein are targeted to specific cell types by displaying a functional heterologous ligand on their virion surface.

[0753] In certain embodiments, the recombinant viral vectors provided herein are AAV based viral vectors. In preferred embodiments, the recombinant viral vectors provided herein are AAV8 based viral vectors. In certain embodiments, the AAV8 based viral vectors provided herein retain tropism for retinal cells. In certain embodiments, the AAV-based vectors provided herein encode the AAV rep gene (required for replication) and/or the AAV cap gene (required for synthesis of the capsid proteins). Multiple AAV serotypes have been identified. In certain embodiments, AAV-based vectors provided herein comprise components from one or more serotypes of AAV. In certain embodiments, AAV based vectors provided herein comprise capsid components from one or more of AAV1, AAV2, AAV2tYF, AAV3, AAV4, AAV5, AAV6, AAV7, AAV8, AAV9, AAV10, AAV11, or AAVrh10. In preferred embodiments, AAV based vectors provided herein comprise components from one or more of AAV8, AAV9, AAV10, AAV11, or AAVrh10 serotypes.

[0754] Provided in particular embodiments are AAV8 vectors comprising a viral genome comprising an expression cassette for expression of the therapeutic product, under the control of regulatory elements and flanked by ITRs and a viral capsid that has the amino acid sequence of the AAV8 capsid protein or is at least 95%, 96%, 97%, 98%, 99% or 99.9% identical to the amino acid sequence of the AAV8 capsid protein (SEQ ID NO: 48) while retaining the biological function of the AAV8 capsid. In certain embodiments, the encoded AAV8 capsid has the sequence of SEQ ID NO: 48 with 1, 2, 3, 4, 5, 6, 7, 8, 9, 10, 11, 12, 13, 14, 15, 16, 17, 18, 19, 20, 21, 22, 23, 24, 25, 26, 27, 28, 29 or 30 amino acid substitutions and retaining the biological function of the AAV8 capsid.

[0755] In certain embodiments, the AAV that is used in the methods described herein is Anc80 or Anc80L65, as described in Zinn et al., 2015, Cell Rep. 12(6): 1056-1068, which is incorporated by reference in its entirety. In certain embodiments, the AAV that is used in the methods described herein comprises one of the following amino acid insertions: LGETTRP or LALGETTRP, as described in U.S. Pat. Nos. 9,193,956; 9,458,517; and 9,587,282 and US patent application publication no. 2016/0376323, each of which is incorporated herein by reference in its entirety. In certain embodiments, the AAV that is used in the methods described herein is AAV.7m8, as described in U.S. Pat. Nos. 9,193,956; 9,458,517; and 9,587,282 and US patent application publication no. 2016/0376323, each of which is incorporated herein by reference in its entirety. In certain embodiments, the AAV that is used in the methods described herein is any AAV disclosed in U.S. Pat. No. 9,585,971, such as AAV-PHP.B. In certain embodiments, the AAV that is used in the methods described herein is an AAV disclosed in any of the following patents and patent applications, each of which is incorporated herein by reference in its entirety: U.S. Pat. Nos. 7,906,111; 8,524,446; 8,999,678; 8,628,966; 8,927,514; 8,734,809; 9,284,357; 9,409,953; 9,169,299; 9,193,956; 9,458,517; and 9,587,282 US patent application publication nos. 2015/0374803; 2015/0126588; 2017/0067908; 2013/0224836; 2016/0215024; 2017/0051257; and International Patent Application Nos. PCT/US2015/034799; PCT/EP2015/053335.

[0756] AAV8-based viral vectors are used in certain embodiments of the methods described herein. Nucleic acid sequences of AAV based viral vectors and methods of making recombinant AAV and AAV capsids are taught, for example, in U.S. Pat. No. 7,282,199 B2, U.S. Pat. No. 7,790,449 B2, U.S. Pat. No. 8,318,480 B2, U.S. Pat. No. 8,962,332 B2 and International Patent Application No. PCT/EP2014/076466, each of which is incorporated herein by reference in its entirety. In one aspect, provided herein are AAV (e.g., AAV8)-based viral vectors encoding a therapeutic product.

[0757] In certain embodiments, a single-stranded AAV (ssAAV) may be used supra. In certain embodiments, a self-complementary vector, e.g., scAAV, may be used (see, e.g., Wu, 2007, Human Gene Therapy, 18(2):171-82, McCarty et al, 2001, Gene Therapy, Vol 8, Number 16, Pages 1248-1254; and U.S. Pat. Nos. 6,596,535; 7,125,717; and 7,456,683, each of which is incorporated herein by reference in its entirety).

[0758] In certain embodiments, the recombinant viral vectors used in the methods described herein is a recombinant adenovirus vector. The recombinant adenovirus can be a first generation vector, with an E1 deletion, with or without an E3 deletion, and with the expression cassette inserted into either deleted region. The recombinant adenovirus can be a second generation vector, which contains full or partial deletions of the E2 and E4 regions. A helper-dependent adenovirus retains only the adenovirus inverted terminal repeats and the packaging signal (phi). The therapeutic product is inserted between the packaging signal and the 3′ ITR, with or without stuffer sequences to keep the genome close to wild-type size of approx. 36 kb. An exemplary protocol for production of adenoviral vectors may be found in Alba et al., 2005, “Gutless adenovirus: last generation adenovirus for gene therapy,” Gene Therapy 12:S18-S27, which is incorporated by reference herein in its entirety.

[0759] In certain embodiments, the recombinant viral vectors used in the methods described herein are lentivirus based viral vectors. Four plasmids are used to make the construct: Gag/pol sequence containing plasmid, Rev sequence containing plasmids, Envelope protein containing plasmid (i.e. VSV-G), and Cis plasmid with the packaging elements and the therapeutic product containing plasmid.

[0760] For lentiviral vector production, the four plasmids are co-transfected into cells (i.e., HEK293 based cells), whereby polyethylenimine or calcium phosphate can be used as transfection agents, among others. The lentivirus is then harvested in the supernatant (lentiviruses need to bud from the cells to be active, so no cell harvest needs/should be done). The supernatant is filtered (0.45 μm) and then magnesium chloride and benzonase added. Further downstream processes can vary widely, with using TFF and column chromatography being the most GMP compatible ones. Others use ultracentrifugation with/without column chromatography. Exemplary protocols for production of lentiviral vectors may be found in Lesch et al., 2011, “Production and purification of lentiviral vector generated in 293T suspension cells with baculoviral vectors,” Gene Therapy 18:531-538, and Ausubel et al., 2012, “Production of CGMP-Grade Lentiviral Vectors,” Bioprocess Int. 10(2):32-43, both of which are incorporated by reference herein in their entireties.

### (d) Promoters and Modifiers of Gene Expression

[0761] In certain embodiments, the recombinant vectors provided herein comprise components that modulate delivery or expression of the therapeutic product (e.g., “expression control elements”). In certain embodiments, the recombinant vectors provided herein comprise components that modulate expression of the therapeutic product. In certain embodiments, the recombinant vectors provided herein comprise components that influence binding or targeting to cells. In certain embodiments, the recombinant vectors provided herein comprise components that influence the localization of the polynucleotide encoding the therapeutic product within the cell after uptake. In certain embodiments, the recombinant vectors provided herein comprise components that can be used as detectable or selectable markers, e.g., to detect or select for cells that have taken up the polynucleotide encoding the therapeutic product.

[0762] In certain embodiments, the recombinant vectors provided herein comprise one or more promoters. In certain embodiments, the promoter is a constitutive promoter. In certain embodiments, the promoter is an inducible promoter. Inducible promoters may be preferred so that expression of the therapeutic product may be turned on and off as desired for therapeutic efficacy. Such promoters include, for example, hypoxia-induced promoters and drug inducible promoters, such as promoters induced by rapamycin and related agents. Hypoxia-inducible promoters include promoters with HIF binding sites, see, for example, Schodel, et al., 2011, Blood 117(23):e207-e217 and Kenneth and Rocha, 2008, Biochem J. 414:19-29, each of which is incorporated by reference for teachings of hypoxia-inducible promoters. In addition, hypoxia-inducible promoters that may be used in the constructs include the erythropoietin promoter and N-WASP promoter (see, Tsuchiya, 1993, J. Biochem. 113:395 for disclosure of the erythropoietin promoter and Salvi, 2017, Biochemistry and Biophysics Reports 9:13-21 for disclosure of N-WASP promoter, both of which are incorporated by reference for the teachings of hypoxia-induced promoters). Alternatively, the recombinant vectors may contain drug inducible promoters, for example promoters inducible by administration of rapamycin and related analogs (see, for example, International Patent Application Publication Nos. WO94/18317, WO 96/20951, WO 96/41865, WO 99/10508, WO 99/10510, WO 99/36553, and WO 99/41258, and U.S. Pat. No. 7,067,526 (disclosing rapamycin analogs), which are incorporated by reference herein for their disclosure of drug inducible promoters). In certain embodiments the promoter is a hypoxia-inducible promoter. In certain embodiments, the promoter comprises a hypoxia-inducible factor (HIF) binding site. In certain embodiments, the promoter comprises a HIF-1α binding site. In certain embodiments, the promoter comprises a HIF-2a binding site. In certain embodiments, the HIF binding site comprises an RCGTG motif. For details regarding the location and sequence of HIF binding sites, see, e.g., Schodel, et al., Blood, 2011, 117(23):e207-e217, which is incorporated by reference herein in its entirety. In certain embodiments, the promoter comprises a binding site for a hypoxia induced transcription factor other than a HIF transcription factor. In certain embodiments, the recombinant vectors provided herein comprise one or more IRES sites that is preferentially translated in hypoxia. For teachings regarding hypoxia-inducible gene expression and the factors involved therein, see, e.g., Kenneth and Rocha, Biochem J., 2008, 414:19-29, which is incorporated by reference herein in its entirety.

[0763] In certain embodiments, the promoter is a CB7 promoter (see Dinculescu et al., 2005, Hum Gene Ther 16: 649-663, incorporated by reference herein in its entirety). In certain embodiments, the CB7 promoter includes other expression control elements that enhance expression of the therapeutic product driven by the vector, e.g. (1) a CAG promoter; (2) a CBA promoter; (3) a CMV promoter; (4) a 1.7-kb red cone opsin promoter (PR1.7 promoter); (5) a Rhodopsin Kinase (GRK1) photoreceptor-specific enhancer-promoter (Young et al., 2003, Retinal Cell Biology; 44:4076-4085); (6) an hCARp promoter, which is a human cone arrestin promoter; (7) an hRKp, which is a rhodopsin kinase promoter; (8) a cone photoreceptor specific human arrestin 3 (ARR3) promoter; (9) a rhodopsin promoter; and (10) a U6 promoter (in particular when the therapeutic product is a small RNA such as shRNA or siRNA).

[0764] In certain embodiments, the other expression control elements include chicken β-actin intron and/or rabbit β-globin polA signal. In certain embodiments, the promoter comprises a TATA box. In certain embodiments, the promoter comprises one or more elements. In certain embodiments, the one or more promoter elements may be inverted or moved relative to one another. In certain embodiments, the elements of the promoter are positioned to function cooperatively. In certain embodiments, the elements of the promoter are positioned to function independently. In certain embodiments, the recombinant vectors provided herein comprise one or more promoters selected from the group consisting of the human CMV immediate early gene promoter, the SV40 early promoter, the Rous sarcoma virus (RS) long terminal repeat, and rat insulin promoter. In certain embodiments, the recombinant vectors provided herein comprise one or more long terminal repeat (LTR) promoters selected from the group consisting of AAV, MLV, MMTV, SV40, RSV, HIV-1, and HIV-2 LTRs. In certain embodiments, the recombinant vectors provided herein comprise one or more tissue specific promoters (e.g., a retinal pigment epithelial cell-specific promoter). In certain embodiments, the recombinant vectors provided herein comprise a RPE65 promoter. In certain embodiments, the recombinant vectors provided herein comprise a VMD2 promoter.

[0765] In certain embodiments, the recombinant vectors provided herein comprise one or more regulatory elements other than a promoter. In certain embodiments, the recombinant vectors provided herein comprise an enhancer. In certain embodiments, the recombinant vectors provided herein comprise a repressor. In certain embodiments, the recombinant vectors provided herein comprise an intron or a chimeric intron. In certain embodiments, the recombinant vectors provided herein comprise a polyadenylation sequence.

### (e) Signal Peptides

[0766] In certain embodiments wherein the therapeutic product is a therapeutic protein, the recombinant vectors provided herein comprise components that modulate protein delivery. In certain embodiments, the recombinant vectors provided herein comprise one or more signal peptides. Signal peptides may also be referred to herein as “leader sequences” or “leader peptides”. In certain embodiments, the signal peptides allow for the therapeutic product to achieve the proper packaging (e.g. glycosylation) in the cell. In certain embodiments, the signal peptides allow for the therapeutic product to achieve the proper localization in the cell. In certain embodiments, the signal peptides allow for the therapeutic product to achieve secretion from the cell. Examples of signal peptides to be used in connection with the recombinant vectors and therapeutic products provided herein may be found in Table 1.

TABLE 1
Signal peptides for use with the vectors provided
herein.

| SEQ | | |
|---|---|---|
| ID | | |
| NO. | Signal Peptide | Sequence |
| 5 | VEGF-A signal peptide | MNFLLSWVHW SLALLLYLHH |
| | | AKWSQA |
| 6 | Fibulin-1 signal peptide | MERAAPSRRV PLPLLLLGGL |
| | | ALLAAGVDA |
| 7 | Vitronectin signal | MAPLRPLLIL ALLAWVALA |
| | peptide | |
| 8 | Complement Factor H | MRLLAKIICLMLWAICVA |
| | signal peptide | |
| 9 | Opticin signal peptide | MRLLAFLSLL ALVLQETGT |
| 22 | Albumin signal peptide | MKWVTFISLLFLFSSAYS |
| 23 | Chymotrypsinogen signal | MAFLWLLSCWALLGTTFG |
| | peptide | |
| 24 | Interleukin-2 signal | MYRMQLLSCIALILALVTNS |
| | peptide | |
| 25 | Trypsinogen-2 signal | MNLLLILTFVAAAVA |
| | peptide | |

### (f) Polycistronic Messages—IRES and F2A Linkers

[0767] Internal ribosome entry sites. A single construct can be engineered to encode two peptides (for example, both the heavy and light chains of an antibody) separated by a cleavable linker or IRES so that the two peptides (for example, separate heavy and light chain polypeptides) are expressed by the transduced cells. In certain embodiments, the recombinant vectors provided herein provide polycistronic (e.g., bicistronic) messages. For example, the recombinant vector can comprise a nucleotide sequence encoding two peptides (for example, the heavy and light chains of an antibody) separated by an internal ribosome entry site (IRES) elements (for example, the use of IRES elements to create bicistronic vectors see, e.g., Gurtu et al., 1996, Biochem. Biophys. Res. Comm. 229(1):295-8, which is herein incorporated by reference in its entirety). IRES elements bypass the ribosome scanning model and begin translation at internal sites. The use of IRES in AAV is described, for example, in Furling et al., 2001, Gene Ther 8(11): 854-73, which is herein incorporated by reference in its entirety. In certain embodiments, the bicistronic message is contained within a recombinant vector with a restraint on the size of the polynucleotide(s) therein. In certain embodiments, the bicistronic message is contained within an AAV virus-based vector (e.g., an AAV8-based vector).

[0768] Furin-F2A linkers. In other embodiments, the recombinant vectors provided herein comprise a nucleotide sequence encoding two peptides (for example, the heavy and light chains of an antibody) separated by a cleavable linker such as the self-cleaving furin/F2A (F/F2A) linkers (Fang et al., 2005, Nature Biotechnology 23: 584-590, and Fang, 2007, Mol Ther 15: 1153-9, each of which is incorporated by reference herein in its entirety).

[0769] For example, a furin-F2A linker may be incorporated into an expression cassette to separate the coding sequences of the two peptides (for example, the heavy and light chain coding sequences), resulting in a construct with the structure:

Leader—Peptide A (for example, Heavy chain of an antibody)—Furin site—F2A site—Leader—Peptide B (for example, Light chain of an antibody)—PolyA.

[0770] The F2A site, with the amino acid sequence LLNFDLLKLAGDVESNPGP (SEQ ID NO: 26) is self-processing, resulting in “cleavage” between the final G and P amino acid residues. Additional linkers that could be used include but are not limited to:

(SEQ ID NO: 27)
T2A: (GSG)E G R G S L L T C G D V E E N P G P;
(SEQ ID NO: 28)
P2A: (GSG)A T N F S L L K Q A G D V E E N P G P;
(SEQ ID NO: 29)
E2A: (GSG)Q C T N Y A L L K L A G D V E S N P G P;
(SEQ ID NO: 30)
F2A: (GSG)V K Q T L N F D L L K L A G D V E S N P
G P.

[0771] A peptide bond is skipped when the ribosome encounters the F2A sequence in the open reading frame, resulting in the termination of translation, or continued translation of the downstream sequence (the second peptide). This self-processing sequence results in a string of additional amino acids at the end of the C-terminus of the first peptide. However, such additional amino acids are then cleaved by host cell Furin at the furin sites, located immediately prior to the F2A site and after the sequence of the first peptide, and further cleaved by carboxypeptidases. The resultant first peptide may have one, two, three, or more additional amino acids included at the C-terminus, or it may not have such additional amino acids, depending on the sequence of the Furin linker used and the carboxypeptidase that cleaves the linker in vivo (See, e.g., Fang et al., 17 Apr. 2005, Nature Biotechnol. Advance Online Publication; Fang et al., 2007, Molecular Therapy 15(6):1153-1159; Luke, 2012, Innovations in Biotechnology, Ch. 8, 161-186). Furin linkers that may be used comprise a series of four basic amino acids, for example, RKRR, RRRR, RRKR, or RKKR. Once this linker is cleaved by a carboxypeptidase, additional amino acids may remain, such that an additional zero, one, two, three or four amino acids may remain on the C-terminus of the first peptide, for example, R, RR, RK, RKR, RRR, RRK, RKK, RKRR, RRRR, RRKR, or RKKR. In certain embodiments, one the linker is cleaved by an carboxypeptidase, no additional amino acids remain. In certain embodiments, the furin linker has the sequence R-X-K/R-R, such that the additional amino acids on the C-terminus of the first peptide are R, RX, RXK, RXR, RXKR, or RXRR, where X is any amino acid, for example, alanine (A). In certain embodiments, no additional amino acids may remain on the C-terminus of the first peptide.

[0772] In certain embodiments, an expression cassette described herein is contained within a recombinant vector with a restraint on the size of the polynucleotide(s) therein. In certain embodiments, the expression cassette is contained within an AAV virus-based vector (e.g., an AAV8-based vector).

### (g) Untranslated Regions

[0773] In certain embodiments wherein the therapeutic product is a therapeutic protein, the recombinant vectors provided herein comprise one or more untranslated regions (UTRs), e.g., 3′ and/or 5′ UTRs. In certain embodiments, the UTRs are optimized for the desired level of protein expression. In certain embodiments, the UTRs are optimized for the half-life of the mRNA encoding the therapeutic protein. In certain embodiments, the UTRs are optimized for the stability of the mRNA encoding the therapeutic protein. In certain embodiments, the UTRs are optimized for the secondary structure of the mRNA encoding the therapeutic protein.

### (h) Inverted Terminal Repeats

[0774] In certain embodiments, the recombinant viral vectors provided herein comprise one or more inverted terminal repeat (ITR) sequences. ITR sequences may be used for packaging the recombinant therapeutic product expression cassette into the virion of the recombinant viral vector. In certain embodiments, the ITR is from an AAV, e.g., AAV8 or AAV2 (see, e.g., Yan et al., 2005, J. Virol., 79(1):364-379; U.S. Pat. No. 7,282,199 B2, U.S. Pat. No. 7,790,449 B2, U.S. Pat. No. 8,318,480 B2, U.S. Pat. No. 8,962,332 B2 and International Patent Application No. PCT/EP2014/076466, each of which is incorporated herein by reference in its entirety).

### (i) Therapeutic Product

[0775] The therapeutic products can be, for example, therapeutic proteins (for example, antibodies), therapeutic RNAs (for example, shRNAs, siRNAs, and miRNAs), or therapeutic aptamers. Antibodies include, but are not limited to, monoclonal antibodies, polyclonal antibodies, recombinantly produced antibodies, human antibodies, humanized antibodies, chimeric antibodies, synthetic antibodies, tetrameric antibodies comprising two heavy chain and two light chain molecules, antibody light chain monomers, antibody heavy chain monomers, antibody light chain dimers, antibody heavy chain dimers, antibody light chain-heavy chain pairs, intrabodies, heteroconjugate antibodies, monovalent antibodies, antigen-binding fragments of full-length antibodies, and fusion proteins of the above. Such antigen-binding fragments include, but are not limited to, single-domain antibodies (variable domain of heavy chain antibodies (VHHs) or nanobodies), Fabs, F(ab′)₂s, and scFvs (single-chain variable fragments).

[0776] In certain embodiments of the methods described herein, the therapeutic product is: (1) anti-human vascular endothelial growth factor (hVEGF) antibody or aptamer; (2) an anti-hVEGF antigen-binding fragment; (3) anti-hVEGF antigen-binding fragment is a Fab, F(ab′)₂, or single chain variable fragment (scFv); (4) Palmitoyl-Protein Thioesterase 1 (PPT1); (5) Tripeptidyl-Peptidase 1 (TPP1); (6) Battenin (CLN3); (7) CLN6 Transmembrane ER Protein (CLN6); (8) Major Facilitator Superfamily Domain Containing 8 (MFSD8); (9) Myosin VIIA (MYO7A); (1) Cadherin Related 23 (CDH23); (11) Protocadherin Related 15 (PCDH15); (12) Usherin (USH2A); (13) Clarin 1 (CLRN1); (14) ATP Binding Cassette Subfamily A Member 4 (ABCA4); (15) ELOVL Fatty Acid Elongase 4 (ELOVL4); anti-Interleukin 6 (IL6) monoclonal antibody/aptamer; (16) anti-TNF-alpha (TNF) monoclonal antibody or aptamers; (17) L opsin (OPN1LW); (18) M opsin (OPN1MW); (19) Guanylate Cyclase 2D, Retinal (GUCY2D); (20) Retinoid Isomerohydrolase RPE65 (RPE65); (21) Spermatogenesis Associated 7 (SPATA7); (22) Aryl Hydrocarbon Receptor Interacting Protein Like 1 (AIPL1); (23) Lebercilin (LCA5); (24) RPGR Interacting Protein 1 (RPGRIP1); (25) Cone-Rod Homeobox (CRX); (26) Crumbs Cell Polarity Complex Component 1 (CRB1); (27) Nicotinamide Nucleotide Adenylyltransferase 1 (NMNAT1); (28) Centrosomal Protein 290 (CEP290); (29) Inosine Monophosphate Dehydrogenase 1 (IMPDH1); (3) Retinal Degeneration 3, GUCY2D regulator (RD3); (31) Retinol Dehydrogenase 12 (RDH12); (32) Lecithin Retinol Acyltransferase (LRAT); (33) Tubby Like Protein 1 (TULP1); (34) Potassium Voltage-Gated Channel Subfamily J Member 13 (KCNJ13); (35) Mitochondrially Encoded NADH Dehydrogenase 1 (MT-ND1); (36) Mitochondrially Encoded NADH Dehydrogenase 4 (MT-ND4); (37) Mitochondrially Encoded NADH Dehydrogenase 6 (MT-ND6); (38) anti-complement monoclonal antibody or aptamers, wherein the anti-complement monoclonal antibody or aptamer is an anti-complement C1 antibody or aptamer, an anti-complement C1q monoclonal antibody or aptamer, an anti-complement C1s monoclonal antibody or aptamer, an anti-complement C2 monoclonal antibody or aptamer, an anti-complement C2a monoclonal antibody or aptamer, an anti-complement C2b monoclonal antibody or aptamer, an anti-complement C3 monoclonal antibody or aptamer, an anti-complement C3a monoclonal antibody or aptamer, an anti-complement C3b monoclonal antibody or aptamer, an anti-complement C4 monoclonal antibody or aptamer, an anti-complement C4a monoclonal antibody or aptamer, an anti-complement C4b monoclonal antibody or aptamer, an anti-complement C5 monoclonal antibody or aptamer, an anti-complement C5a monoclonal antibody or aptamer, an anti-complement C5b monoclonal antibody or aptamer, an anti-complement C6 monoclonal antibody or aptamer, an anti-complement C7 monoclonal antibody or aptamer, an anti-complement C8 monoclonal antibody or aptamer, or an anti-complement C9 monoclonal antibody or aptamer, or preferably an anti-complement C5 antibody and the pathology of the eye is associated with neuromyelitis optica (NMO); (39) an anti-IL6 monoclonal antibody or aptamer and the pathology of the eye is associated with NMO; (40) anti-complement monoclonal antibody or aptamer, wherein the anti-complement monoclonal antibody or aptamer is an anti-complement C1 monoclonal antibody or aptamer, an anti-complement C1q monoclonal antibody or aptamer, an anti-complement C1s monoclonal antibody or aptamer, an anti-complement C2 monoclonal antibody or aptamer, an anti-complement C2a monoclonal antibody or aptamer, an anti-complement C2b monoclonal antibody or aptamer, an anti-complement C3 monoclonal antibody or aptamer, an anti-complement C3a monoclonal antibody or aptamer, an anti-complement C3b monoclonal antibody or aptamer, an anti-complement C4 monoclonal antibody or aptamer, an anti-complement C4a monoclonal antibody or aptamer, an anti-complement C4b monoclonal antibody or aptamer, an anti-complement C5 monoclonal antibody or aptamer, an anti-complement C5a monoclonal antibody or aptamer, an anti-complement C5b monoclonal antibody or aptamer, an anti-complement C6 monoclonal antibody or aptamer, an anti-complement C7 monoclonal antibody or aptamer, an anti-complement C8 monoclonal antibody or aptamer, or an anti-complement C9 monoclonal antibody or aptamers, or preferably an anti-complement C5 antibody; (41) Angiotensin I Converting Enzyme (ACE); (42) Interleukin 10 (IL10); (43) anti-TNF monoclonal antibody; (43) Rab Escort Protein 1 (CHM); (44) Retinoschisin (RS1); (45) Bardet-Biedl Syndrome 1 (BBS1); (46) Bardet-Biedl Syndrome 2 (BBS2); (47) ADP Ribosylation Factor Like GTPase 6 (ARL6); (48) Bardet-Biedl Syndrome 4 (BBS4); (49) Bardet-Biedl Syndrome 5 (BBS5); (50) McKusick-Kaufman Syndrome (MKKS); (51) Bardet-Biedl Syndrome 7 (BBS7); (52) Tetratricopeptide Repeat Domain 8 (TTC8); (53) Bardet-Biedl Syndrome 9 (BBS9); (54) Bardet-Biedl Syndrome 10 (BBS10); (55) Tripartite Motif Containing 32 (TRIM32); (56) Bardet-Biedl Syndrome 12 (BBS12); (57) MKS Transition Zone Complex Subunit 1 (MKS1); (58) WD Repeat Containing Planar Cell Polarity Effector (WDPCP); (59) Serologically Defined Colon Cancer Antigen 8 (SDCCAG8); (6) Leucine Zipper Transcription Factor Like 1 (LZTFL1); (61) BBSome Interacting Protein 1 (BBIP1); (62) Intraflagellar Transport 27 (IFT27); (63) Guanylate Cyclase Activator 1A (GUCA1A); (64) OPA1 Mitochondrial Dynamin Like GTPase (OPA1); (65) RP1 Axonemal Microtubule Associated (RP1); (66) RP2 Activator of ARL3 GTPase (RP2); (67) Peripherin 2 (PRPH2); (68) Pre-mRNA Processing Factor 31(PRPF31); (69) Pre-mRNA Processing Factor 8 (PRPF8); (70) Eyes Shut Homolog (EYS); (71) FAM161 Centrosomal Protein A (FAM161A); (72) Nuclear Receptor Subfamily 2 Group E Member 3 (NR2E3); (73) MER Proto-Oncogene, Tyrosine Kinase (MERTK); (74) Phosphodiesterase 6B (PDE6B); (75) Prominin 1 (PROM1); (76) Phosphodiesterase 6A (PDE6A); (77) Interphotoreceptor Matrix Proteoglycan 2 (IMPG2); (78) Male Germ Cell Associated Kinase (MAK); (79) Intraflagellar Transport 140 (IFT140); (80) anti-membrane attack complex (MAC) monoclonal antibody; (81) HtrA Serine Peptidase 1 (HTRA1); (82) Bestrophin 1 (BEST1); (83) complement factor B antisense oligonucleotide; (84) anti-beta-amyloid monoclonal antibody; (85) CD59 glycoprotein (CD59); (86) Channelrhodopsin-1 (ChR1); (87) Channelrhodopsin-2 (ChR2), (88) anti-complement factor C5a aptamer or monoclonal antibody; (89) anti-complement factor D monoclonal antibody or aptamers; (90) DnaJ heat shock protein family (Hsp40) member C3 (DNAJC3); (91) beta-2 adrenoceptor siRNA; (92) Caspase-2 (CASP2); (93) Insulin Receptor Substrate 1 (IRS1); (94) HIF-1 Responsive Protein RTP801 (RTP801); (95) Transforming Growth Factor Beta 2 (TGFB2); (96) Brain Derived Neurotrophic Factor (BDNF); (97) Ciliary Neurotrophic Factor (CNTF); (98) Prostaglandin-Endoperoxide Synthase 2 (PTGS2); (99) Prostaglandin F Receptor (PTGFR); (100) hyaluronidase; (101) Pigment Epithelium-Derived Factor (PEDF); (102) Vascular Endothelial Growth Factor (VEGF); (103) Placental Growth Factor (PGF); (104) Myocilin (MYOC); (105) C-C Motif Chemokine Receptor 5 (CCR5) siRNA; (106) anti-CD19 monoclonal antibody or aptamers; (107) Crumbs Cell Polarity Complex Component 2 (CRB2); (108) Histone Deacetylase 4 (HDAC4); (109) Rhodopsin (RHO); (110) Nerve Growth Factor (NGF); (111) Nuclear Factor, Erythroid 2 Like 2 (NRF2); (112) Glutathione S-Transferase PI 1 (GSTP1); (113) Rod-Derived Cone Viability Factor (RDCVF); (114) Retinaldehyde Binding Protein 1 (RLBP1); (115) Double Homeobox 4 (DUX4); (116) NLR Family Pyrin Domain Containing 3 (NLRP3); (117) Spleen Associated Tyrosine Kinase (SYK); (118) Adrenocorticotropic Hormone (ACTH); (119) anti-CD59 monoclonal antibody or aptamers; (120) NOTCH Regulated Ankyrin Repeat Protein (NRARP); (121) Alpha-2-Antiplasmin (A2AP); (122) Plasminogen (PLG); (123) growth hormone; (124) Insulin Like Growth Factor 1 (IGF1); (125) Interleukin 1 Beta (IL1B); (126) Angiotensin I Converting Enzyme 2 (ACE2); (127) anti-integrin oligopeptide; (128) anti-Placental Growth Factor (PGF) monoclonal antibody or aptamer; (129) anti-Insulin-Like Growth Factor 1 Receptor (IGF1R) monoclonal antibody or aptamer; (130) anti-Insulin-Like Growth Factor 2 Receptor (IGF2R) monoclonal antibody or aptamer; (131) RTP801 siRNA; (132) Matrix Metalloproteinase 2 (MMP2) RNAi; (133) G-Protein Coupled Receptor 143 (GPR143); (134) Tyrosinase (TYR); (135) anti-Leucine Rich Repeat And Ig Domain Containing Protein 1 (LINGO1) monoclonal antibody or aptamers; (136) Retinitis Pigmentosa GTPase Regulator (RPGR); (137) Cyclic Nucleotide Gated Channel Beta 3 (CNGB3); (138) Cyclic Nucleotide Gated Channel Alpha 3 (CNGA3); (139) Retinoid Isomerohydrolase RPE65 (RPE65); (14) anti-TNF-alpha (TNF) monoclonal antibody; or (140) Interleukin 10 (IL10).

[0777] In certain embodiments of the methods described herein, (1) the pathology of the eye is associated with Batten-CLN1 and the therapeutic product is Palmitoyl-Protein Thioesterase 1 (PPT1); (2) the pathology of the eye is associated with Batten-CLN2 and the therapeutic product is Tripeptidyl-Peptidase 1 (TPP1); (3) the pathology of the eye is associated with Batten-CLN3 and the therapeutic product is Battenin (CLN3); (4) the pathology of the eye is associated with Batten-CLN6 and the therapeutic product is CLN6 Transmembrane ER Protein (CLN6); (5) the pathology of the eye is associated with Batten-CLN7 and the therapeutic product is Major Facilitator Superfamily Domain Containing 8 (MFSD8); (6) the pathology of the eye is associated with Usher's-Type 1 and the therapeutic product is Myosin VIIA (MYO7A); (7) the pathology of the eye is associated with Usher's-Type 1 and the therapeutic product is Cadherin Related 23 (CDH23); (8) the pathology of the eye is associated with Usher's-Type 2 and the therapeutic product is Protocadherin Related 15 (PCDH15); (9) the pathology of the eye is associated with Usher's-Type 2 and the therapeutic product is Usherin (USH2A); (10) the pathology of the eye is associated with Usher's-Type 3 and the therapeutic product is Clarin 1 (CLRN1); (11) the pathology of the eye is associated with Stargardt's and the therapeutic product is ATP Binding Cassette Subfamily A Member 4 (ABCA4); (12) the pathology of the eye is associated with Stargardt's and the therapeutic product is ELOVL Fatty Acid Elongase 4 (ELOVL4); (13) the pathology of the eye is associated with uveitis and the therapeutic product is an anti-Interleukin 6 (IL6) monoclonal antibody; (14) the pathology of the eye is associated with uveitis and the therapeutic product is an anti-TNF-alpha (TNF) monoclonal antibody; (15) the pathology of the eye is associated with diabetic macular edema (DME) and the therapeutic product is an anti-IL6 monoclonal antibody; (16) the pathology of the eye is associated with red-green color blindness and the therapeutic product is L opsin (OPN1LW); (17) the pathology of the eye is associated with red-green color blindness and the therapeutic product is M opsin (OPN1MW); (18) the pathology of the eye is associated with blue cone monochromacy and the therapeutic product is M opsin (OPN1MW); (19) the pathology of the eye is associated with Leber congenital amaurosis-1 (LCA 1) and the therapeutic product is Guanylate Cyclase 2D, Retinal (GUCY2D); (20) the pathology of the eye is associated with Leber congenital amaurosis-2 (LCA 2) and the therapeutic product is Retinoid Isomerohydrolase RPE65 (RPE65); (21) the pathology of the eye is associated with LCA 3 and the therapeutic product is Spermatogenesis Associated 7 (SPATA7); (22) the pathology of the eye is associated with Leber congenital amaurosis-4 (LCA 4) and the therapeutic product is Aryl Hydrocarbon Receptor Interacting Protein Like 1 (AIPL1); (23) the pathology of the eye is associated with Leber congenital amaurosis-5 (LCA 5) and the therapeutic product is Lebercilin (LCA5); (24) the pathology of the eye is associated with Leber congenital amaurosis-6 (LCA 6) and the therapeutic product is RPGR Interacting Protein 1 (RPGRIP1); (25) the pathology of the eye is associated with Leber congenital amaurosis-7 (LCA 7) and the therapeutic product is Cone-Rod Homeobox (CRX); (26) the pathology of the eye is associated with Leber congenital amaurosis-8 (LCA 8) and the therapeutic product is Crumbs Cell Polarity Complex Component 1 (CRB1) (also known as LCA8); (27) the pathology of the eye is associated with Leber congenital amaurosis-9 (LCA 9) and the therapeutic product is Nicotinamide Nucleotide Adenylyltransferase 1 (NMNAT1); (28) the pathology of the eye is associated with Leber congenital amaurosis-10 (LCA 10) and the therapeutic product is Centrosomal Protein 290 (CEP290); (29) the pathology of the eye is associated with Leber congenital amaurosis-11 (LCA 11) and the therapeutic product is Inosine Monophosphate Dehydrogenase 1 (IMPDH1); (30) the pathology of the eye is associated with Leber congenital amaurosis-12 (LCA 12) and the therapeutic product is Retinal Degeneration 3, GUCY2D regulator (RD3); (31) the pathology of the eye is associated with Leber congenital amaurosis-13 (LCA 13) and the therapeutic product is Retinol Dehydrogenase 12 (RDH12); (32) the pathology of the eye is associated with Leber congenital amaurosis-14 (LCA 14) and the therapeutic product is Lecithin Retinol Acyltransferase (LRAT); (33) the pathology of the eye is associated with Leber congenital amaurosis-15 (LCA 15) and the therapeutic product is Tubby Like Protein 1 (TULP1); (34) the pathology of the eye is associated with Leber congenital amaurosis-16 (LCA 16) and the therapeutic product is Potassium Voltage-Gated Channel Subfamily J Member 13 (KCNJ13); (35) the pathology of the eye is associated with Leber's hereditary optic neuropathy (LHON) and the therapeutic product is Mitochondrially Encoded NADH Dehydrogenase 1 (MT-ND1); (36) the pathology of the eye is associated with LHON and the therapeutic product is Mitochondrially Encoded NADH Dehydrogenase 4 (MT-ND4); (37) the pathology of the eye is associated with LHON and the therapeutic product is Mitochondrially Encoded NADH Dehydrogenase 6 (MT-ND6); (38) the pathology of the eye is associated with neuromyelitis optica (NMO) and the therapeutic product is an anti-complement antibody or an anti-complement aptamer, wherein the anti-complement monoclonal antibody or aptamer is an anti-complement C1 antibody or aptamer, an anti-complement C1q monoclonal antibody or aptamer, an anti-complement C1s monoclonal antibody or aptamer, an anti-complement C2 monoclonal antibody or aptamer, an anti-complement C2a monoclonal antibody or aptamer, an anti-complement C2b monoclonal antibody or aptamer, an anti-complement C3 monoclonal antibody or aptamer, an anti-complement C3a monoclonal antibody or aptamer, an anti-complement C3b monoclonal antibody or aptamer, an anti-complement C4 monoclonal antibody or aptamer, an anti-complement C4a monoclonal antibody or aptamer, an anti-complement C4b monoclonal antibody or aptamer, an anti-complement C5 monoclonal antibody or aptamer, an anti-complement C5a monoclonal antibody or aptamer, an anti-complement C5b monoclonal antibody or aptamer, an anti-complement C6 monoclonal antibody or aptamer, an anti-complement C7 monoclonal antibody or aptamer, an anti-complement C8 monoclonal antibody or aptamer, or an anti-complement C9 monoclonal antibody or aptamer, or preferably an anti-complement C5 antibody; (39) the pathology of the eye is associated with NMO and the therapeutic product is an anti-IL6 monoclonal antibody or aptamer; (40) the pathology of the eye is associated with uveitis and the therapeutic product is an anti-complement monoclonal antibody or aptamer, wherein the anti-complement monoclonal antibody or aptamer is an anti-complement C1 monoclonal antibody or aptamer, an anti-complement C1q monoclonal antibody or aptamer, an anti-complement C1s monoclonal antibody or aptamer, an anti-complement C2 monoclonal antibody or aptamer, an anti-complement C2a monoclonal antibody or aptamer, an anti-complement C2b monoclonal antibody or aptamer, an anti-complement C3 monoclonal antibody or aptamer, an anti-complement C3a monoclonal antibody or aptamer, an anti-complement C3b monoclonal antibody or aptamer, an anti-complement C4 monoclonal antibody or aptamer, an anti-complement C4a monoclonal antibody or aptamer, an anti-complement C4b monoclonal antibody or aptamer, an anti-complement C5 monoclonal antibody or aptamer, an anti-complement C5a monoclonal antibody or aptamer, an anti-complement C5b monoclonal antibody or aptamer, an anti-complement C6 monoclonal antibody or aptamer, an anti-complement C7 monoclonal antibody or aptamer, an anti-complement C8 monoclonal antibody or aptamer, or an anti-complement C9 monoclonal antibody or aptamers, or preferably an anti-complement C5 antibody; (41) the pathology of the eye is associated with uveitis and the therapeutic product is Angiotensin I Converting Enzyme (ACE); (42) the pathology of the eye is associated with uveitis and the therapeutic product is Interleukin 10 (IL10); (43) the pathology of the eye is associated with uveitis and the therapeutic product is an anti-TNF monoclonal antibody; (44) the pathology of the eye is associated with choroideremia and the therapeutic product is Rab Escort Protein 1 (CHM); (45) the pathology of the eye is associated with X-linked retinoschisis (XLRS) and the therapeutic product is Retinoschisin (RS1); (46) the pathology of the eye is associated with Bardet-Biedl syndrome 1 and the therapeutic product is Bardet-Biedl Syndrome 1 (BBS1); (47) the pathology of the eye is associated with Bardet-Biedl syndrome 2 and the therapeutic product is Bardet-Biedl Syndrome 2 (BBS2); (48) the pathology of the eye is associated with Bardet-Biedl syndrome 3 and the therapeutic product is ADP Ribosylation Factor Like GTPase 6 (ARL6) (also known as BBS3); (49) the pathology of the eye is associated with Bardet-Biedl syndrome 4 and the therapeutic product is Bardet-Biedl Syndrome 4 (BBS4); (50) the pathology of the eye is associated with Bardet-Biedl syndrome 5 and the therapeutic product is Bardet-Biedl Syndrome 5 (BBS5); (51) the pathology of the eye is associated with Bardet-Biedl syndrome 6 and the therapeutic product is McKusick-Kaufman Syndrome (MKKS), also known as BBS6; (52) the pathology of the eye is associated with Bardet-Biedl syndrome 7 and the therapeutic product is Bardet-Biedl Syndrome 7 (BBS7); (53) the pathology of the eye is associated with Bardet-Biedl syndrome 8 and the therapeutic product is Tetratricopeptide Repeat Domain 8 (TTC8), also known as BBS8; (54) the pathology of the eye is associated with Bardet-Biedl syndrome 9 and the therapeutic product is Bardet-Biedl Syndrome 9 (BBS9); (55) the pathology of the eye is associated with Bardet-Biedl syndrome 10 and the therapeutic product is Bardet-Biedl Syndrome 10 (BBS10); (56) the pathology of the eye is associated with Bardet-Biedl syndrome 11 and the therapeutic product is Tripartite Motif Containing 32 (TRIM32), also known as BBS11; (57) the pathology of the eye is associated with Bardet-Biedl syndrome 12 and the therapeutic product is Bardet-Biedl Syndrome 12 (BBS12); (58) the pathology of the eye is associated with Bardet-Biedl syndrome 13 and the therapeutic product is MKS Transition Zone Complex Subunit 1 (MKS1), also known as BBS13; (59) the pathology of the eye is associated with Bardet-Biedl syndrome 14 and the therapeutic product is Centrosomal Protein 290 (CEP290), also known as BBS14 and LCA10; (60) the pathology of the eye is associated with Bardet-Biedl syndrome 15 and the therapeutic product is WD Repeat Containing Planar Cell Polarity Effector (WDPCP), also known as BBS15; (61) the pathology of the eye is associated with Bardet-Biedl syndrome 16 and the therapeutic product is Serologically Defined Colon Cancer Antigen 8 (SDCCAG8), also known as BBS16; (62) the pathology of the eye is associated with Bardet-Biedl syndrome 17 and the therapeutic product is Leucine Zipper Transcription Factor Like 1 (LZTFL1), also known as BBS17; (63) the pathology of the eye is associated with Bardet-Biedl syndrome 18 and the therapeutic product is BBSome Interacting Protein 1 (BBIP1), also known as BBS18; (64) the pathology of the eye is associated with Bardet-Biedl syndrome 19 and the therapeutic product is Intraflagellar Transport 27 (IFT27), also known as BBS19; (65) the pathology of the eye is associated with cone dystrophy and the therapeutic product is Guanylate Cyclase Activator 1A (GUCA1A); (66) the pathology of the eye is associated with optic atrophy and the therapeutic product is OPA1 Mitochondrial Dynamin Like GTPase (OPA1); (67) the pathology of the eye is associated with retinitis pigmentosa 1 and the therapeutic product is RP1 Axonemal Microtubule Associated (RP1); (68) the pathology of the eye is associated with retinitis pigmentosa 2 and the therapeutic product is RP2 Activator of ARL3 GTPase (RP2); (69) the pathology of the eye is associated with retinitis pigmentosa 7 and the therapeutic product is Peripherin 2 (PRPH2); (70) the pathology of the eye is associated with retinitis pigmentosa 11 and the therapeutic product is Pre-mRNA Processing Factor 31(PRPF31); (71) the pathology of the eye is associated with retinitis pigmentosa 12 and the therapeutic product is Crumbs Cell Polarity Complex Component 1 (CRB1), also known as LCA8; (72) the pathology of the eye is associated with retinitis pigmentosa 13 and the therapeutic product is Pre-mRNA Processing Factor 8 (PRPF8); (73) the pathology of the eye is associated with retinitis pigmentosa 25 and the therapeutic product is Eyes Shut Homolog (EYS); (74) the pathology of the eye is associated with retinitis pigmentosa 28 and the therapeutic product is FAM161 Centrosomal Protein A (FAM161A); (75) the pathology of the eye is associated with retinitis pigmentosa 37 and the therapeutic product is Nuclear Receptor Subfamily 2 Group E Member 3 (NR2E3); (76) the pathology of the eye is associated with retinitis pigmentosa 38 and the therapeutic product is MER Proto-Oncogene, Tyrosine Kinase (MERTK); (77) the pathology of the eye is associated with retinitis pigmentosa 40 and the therapeutic product is Phosphodiesterase 6B (PDE6B); (78) the pathology of the eye is associated with retinitis pigmentosa 41 and the therapeutic product is Prominin 1 (PROM1); (79) the pathology of the eye is associated with retinitis pigmentosa 43 and the therapeutic product is Phosphodiesterase 6A (PDE6A); (80) the pathology of the eye is associated with retinitis pigmentosa 56 and the therapeutic product is Interphotoreceptor Matrix Proteoglycan 2 (IMPG2); (81) the pathology of the eye is associated with petinitis pigmentosa 62 and the therapeutic product is Male Germ Cell Associated Kinase (MAK); (82) the pathology of the eye is associated with retinitis pigmentosa 80 and the therapeutic product is Intraflagellar Transport 140 (IFT140); (83) the pathology of the eye is associated with dry AMD and the therapeutic product is an anti-complement monoclonal antibody or an anti-complement aptamer, wherein the anti-complement monoclonal antibody or an anti-complement aptamer is an anti-complement C1 monoclonal antibody or aptamer, an anti-complement C1q monoclonal antibody or aptamer, an anti-complement C1s monoclonal antibody or aptamer, an anti-complement C2 monoclonal antibody or aptamer, an anti-complement C2a monoclonal antibody or aptamer, an anti-complement C2b monoclonal antibody or aptamer, an anti-complement C3 monoclonal antibody or aptamer, an anti-complement C3a monoclonal antibody or aptamer, an anti-complement C3b monoclonal antibody or aptamer, an anti-complement C4 monoclonal antibody or aptamer, an anti-complement C4a monoclonal antibody or aptamer, an anti-complement C4b monoclonal antibody or aptamer, an anti-complement C5 monoclonal antibody or aptamer, an anti-complement C5a monoclonal antibody or aptamer, an anti-complement C5b monoclonal antibody or aptamer, an anti-complement C6 monoclonal antibody or aptamer, an anti-complement C7 monoclonal antibody or aptamer, an anti-complement C8 monoclonal antibody or aptamer, or an anti-complement C9 monoclonal antibody or aptamers, or preferably an anti-complement C5 antibody; (84) the pathology of the eye is associated with dry AMD and the therapeutic product is an anti-membrane attack complex (MAC) therapeutic product, preferably the anti-MAC therapeutic product is an anti-MAC monoclonal antibody, which is a monoclonal antibody against a human protein of the membrane attack complex, which is composed of four complement proteins C5b (SEQ ID NOs. 314-316), C6 (SEQ ID NO. 317), C7 (SEQ ID NO. 318), and C8 (SEQ ID NOs. 319-321); (85) the pathology of the eye is associated with dry AMD and the therapeutic product is HtrA Serine Peptidase 1 (HTRA1); (86) the pathology of the eye is associated with Best disease and the therapeutic product is Bestrophin 1 (BEST1); (87) the pathology of the eye is associated with dry AMD and the therapeutic product is a complement factor B antisense oligonucleotide; (88) the pathology of the eye is associated with dry AMD and the therapeutic product is an anti-beta-amyloid monoclonal antibody; (89) the pathology of the eye is associated with dry AMD and the therapeutic product is CD59 glycoprotein (CD59); (90) the pathology of the eye is associated with dry AMD and the therapeutic product is Channelrhodopsin-1 (ChR1), which includes the human homolog of ChR1; (91) the pathology of the eye is associated with dry AMD and the therapeutic product is Channelrhodopsin-2 (ChR2), which includes the human homolog of ChR2; (92) the pathology of the eye is associated with dry AMD and the therapeutic product is an anti-complement monoclonal antibody or an anti-complement aptamer, wherein the anti-complement monoclonal antibody or an anti-complement aptamer is an anti-complement C1 monoclonal antibody or aptamer, an anti-complement C1q monoclonal antibody or aptamer, an anti-complement C1s monoclonal antibody or aptamer, an anti-complement C2 monoclonal antibody or aptamer, an anti-complement C2a monoclonal antibody or aptamer, an anti-complement C2b monoclonal antibody or aptamer, an anti-complement C3 monoclonal antibody or aptamer, an anti-complement C3a monoclonal antibody or aptamer, an anti-complement C3b monoclonal antibody or aptamer, an anti-complement C4 monoclonal antibody or aptamer, an anti-complement C4a monoclonal antibody or aptamer, an anti-complement C4b monoclonal antibody or aptamer, an anti-complement C5 monoclonal antibody or aptamer, an anti-complement C5a monoclonal antibody or aptamer, an anti-complement C5b monoclonal antibody or aptamer, an anti-complement C6 monoclonal antibody or aptamer, an anti-complement C7 monoclonal antibody or aptamer, an anti-complement C8 monoclonal antibody or aptamer, or an anti-complement C9 monoclonal antibody or aptamers, or preferably an anti-complement C5 antibody; (93) the pathology of the eye is associated with dry AMD and the therapeutic product is anti-complement factor D therapeutic product, including but not limited to an anti-complement factor D monoclonal antibody, or an anti-complement factor D aptamer; (94) the pathology of the eye is associated with age-related retinal ganglion cell (RGC) degeneration and the therapeutic product is DnaJ heat shock protein family (Hsp40) member C3 (DNAJC3), also known as P58IPK; (95) the pathology of the eye is associated with blue cone monochromacy (BCM) and the therapeutic product is L opsin (OPN1LW); (96) the pathology of the eye is associated with glaucoma and the therapeutic product is beta-2 adrenoceptor siRNA; (97) the pathology of the eye is associated with glaucoma and the therapeutic product is Caspase-2 (CASP2); (98) the pathology of the eye is associated with glaucoma and the therapeutic product is Insulin Receptor Substrate 1 (IRS1); (99) the pathology of the eye is associated with glaucoma and the therapeutic product is HIF-1 Responsive Protein RTP801 (RTP801); (100) the pathology of the eye is associated with glaucoma and the therapeutic product is Transforming Growth Factor Beta 2 (TGFB2); (101) the pathology of the eye is associated with glaucoma and the therapeutic product is Brain Derived Neurotrophic Factor (BDNF); (102) the pathology of the eye is associated with glaucoma and the therapeutic product is Ciliary Neurotrophic Factor (CNTF); (103) the pathology of the eye is associated with glaucoma and the therapeutic product is Prostaglandin-Endoperoxide Synthase 2 (PTGS2); (104) the pathology of the eye is associated with glaucoma and the therapeutic product is Prostaglandin F Receptor (PTGFR) (when the pathology of the eye is associated with glaucoma, in a specific embodiment, a recombinant viral vector comprising a nucleotide sequence encoding PTGFR can be administered to the human subject in combination with a recombinant viral vector comprising a nucleotide sequence encoding PTGS2; in another specific embodiment, a recombinant viral vector comprising a nucleotide sequence encoding PTGFR and a nucleotide sequence encoding PTGS2 can be administered to the human subject); (105) the pathology of the eye is associated with glaucoma and the therapeutic product is a hyaluronidase, e.g. HYAL1, HYAL2, HYAL3, HYAL4, and HYAL5; (106) the pathology of the eye is associated with glaucoma and the therapeutic product is Pigment Epithelium-Derived Factor (PEDF); (107) the pathology of the eye is associated with glaucoma and the therapeutic product is Vascular Endothelial Growth Factor (VEGF); (108) the pathology of the eye is associated with glaucoma and the therapeutic product is Placental Growth Factor (PGF), wherein PGF can be used in combo with VEGF; (109) the pathology of the eye is associated with glaucoma (e.g., a congenital glaucoma or juvenile glaucoma) and the therapeutic product is Myocilin (MYOC); (110) the pathology of the eye is associated with NMO and the therapeutic product is an anti-complement C5 monoclonal antibody; (111) the pathology of the eye is associated with NMO and the therapeutic product is C-C Motif Chemokine Receptor 5 (CCR5) siRNA, CCR5 shRNA, siRNA or CCR5 miRNA (preferably, a CCR5 miRNA); (112) the pathology of the eye is associated with NMO and the therapeutic product is an anti-CD19 monoclonal antibody; (113) the pathology of the eye is associated with retinitis pigmentosa that is associated with rhodopsin mutations and the therapeutic product is Channelrhodopsin-1 (ChR1), which includes the human homolog of ChR1; (114) the pathology of the eye is associated with retinitis pigmentosa that is associated with rhodopsin mutations and the therapeutic product is Channelrhodopsin-2 (ChR2), which includes the human homolog of ChR2; (115) the pathology of the eye is associated with retinitis pigmentosa and the therapeutic product is Ciliary Neurotrophic Factor (CNTF); (116) the pathology of the eye is associated with autosomal recessive retinitis pigmentosa and the therapeutic product is Crumbs Cell Polarity Complex Component 1 (CRB1); (117) the pathology of the eye is associated with autosomal recessive retinitis pigmentosa and the therapeutic product is Crumbs Cell Polarity Complex Component 2 (CRB2); (118) the pathology of the eye is associated with retinitis pigmentosa and the therapeutic product is Histone Deacetylase 4 (HDAC4); (119) the pathology of the eye is associated with retinitis pigmentosa and the therapeutic product is Rhodopsin (RHO); (120) the pathology of the eye is associated with retinitis pigmentosa and the therapeutic product is Nerve Growth Factor (NGF); (121) the pathology of the eye is associated with retinitis pigmentosa and the therapeutic product is Nuclear Factor, Erythroid 2 Like 2 (NRF2); (122) the pathology of the eye is associated with retinitis pigmentosa and the therapeutic product is Pigment Epithelium-Derived Factor (PEDF); (123) the pathology of the eye is associated with retinitis pigmentosa and the therapeutic product is Glutathione S-Transferase PI 1 (GSTP1), also known as PI; (124) the pathology of the eye is associated with retinitis pigmentosa and the therapeutic product is Rod-Derived Cone Viability Factor (RDCVF); (125) the pathology of the eye is associated with retinitis pigmentosa and the therapeutic product is Rhodopsin (RHO); (126) the pathology of the eye is associated with retinitis pigmentosa and the therapeutic product is Retinaldehyde Binding Protein 1 (RLBP1); (127) the pathology of the eye is associated with Stargardt's disease and the therapeutic product is an anti-complement C5 aptamer; (128) the pathology of the eye is associated with uveitis and the therapeutic product is Double Homeobox 4 (DUX4); (129) the pathology of the eye is associated with uveitis and the therapeutic product is NLR Family Pyrin Domain Containing 3 (NLRP3); (130) the pathology of the eye is associated with uveitis and the therapeutic product is Spleen Associated Tyrosine Kinase (SYK); (131) the pathology of the eye is associated with uveitis and the therapeutic product is Adrenocorticotropic Hormone (ACTH); (132) the pathology of the eye is associated with uveitis and the therapeutic product is Caspase 1 (CASP1); (133) the pathology of the eye is associated with uveitis and the therapeutic product is anti-CD59 therapeutic product (such as an anti-CD59 therapeutic protein (for example, an anti-CD59 monoclonal antibody), or an anti-CD59 therapeutic RNA (for example, an anti-CD59 shRNA, anti-CD59 siRNA, or anti-CD59 miRNA), preferably an anti-CD59 monoclonal antibody); (134) the pathology of the eye is associated with uveitis and the therapeutic product is an anti-complement monoclonal antibody or an anti-complement aptamer, wherein the anti-complement monoclonal antibody or aptamer is an anti-complement C1 monoclonal antibody or aptamer, an anti-complement C1q monoclonal antibody or aptamer, an anti-complement C1s monoclonal antibody or aptamer, an anti-complement C2 monoclonal antibody or aptamer, an anti-complement C2a monoclonal antibody or aptamer, an anti-complement C2b monoclonal antibody or aptamer, an anti-complement C3 monoclonal antibody or aptamer, an anti-complement C3a monoclonal antibody or aptamer, an anti-complement C3b monoclonal antibody or aptamer, an anti-complement C4 monoclonal antibody or aptamer, an anti-complement C4a monoclonal antibody or aptamer, an anti-complement C4b monoclonal antibody or aptamer, an anti-complement C5 monoclonal antibody or aptamer, an anti-complement C5a monoclonal antibody or aptamer, an anti-complement C5b monoclonal antibody or aptamer, an anti-complement C6 monoclonal antibody or aptamer, an anti-complement C7 monoclonal antibody or aptamer, an anti-complement C8 monoclonal antibody or aptamer, or an anti-complement C9 monoclonal antibody or aptamers, or preferably an anti-complement C5 antibody; (135) the pathology of the eye is associated with corneal neovascularization and the therapeutic product is Insulin Receptor Substrate 1 (IRS1); (136) the pathology of the eye is associated with corneal neovascularization and the therapeutic product is NOTCH Regulated Ankyrin Repeat Protein (NRARP); (137) the pathology of the eye is associated with diabetic retinopathy and the therapeutic product is NOTCH Regulated Ankyrin Repeat Protein (NRARP); (138) the pathology of the eye is associated with diabetic retinopathy and the therapeutic product is Alpha-2-Antiplasmin (A2AP); (139) the pathology of the eye is associated with diabetic retinopathy and the therapeutic product is Plasminogen (PLG); (140) the pathology of the eye is associated with diabetic retinopathy and the therapeutic product can be a growth hormone; (141) the pathology of the eye is associated with diabetic retinopathy and the therapeutic product is Insulin Like Growth Factor 1 (IGF1), wherein IGF1 can be used in combo with growth hormone; (142) the pathology of the eye is associated with diabetic retinopathy and the therapeutic product is Interleukin 1 Beta (IL1B). (143) the pathology of the eye is associated with diabetic retinopathy and the therapeutic product is Angiotensin I Converting Enzyme 2 (ACE2), wherein ACE2 can be used in combo with IL1B; (144) the pathology of the eye is associated with diabetic retinopathy and the therapeutic product is IRS1; (145) the pathology of the eye is associated with diabetic retinopathy and the therapeutic product is an anti-integrin oligopeptide; (146) the pathology of the eye is associated with diabetic retinopathy and the therapeutic product is an anti-Placental Growth Factor (PGF) monoclonal antibody; (147) the pathology of the eye is associated with Graves' ophthalmopathy (also known as Graves' orbitopathy) and the therapeutic product is an anti-CD40 monoclonal antibody; (148) the pathology of the eye is associated with Graves' ophthalmopathy and the therapeutic product is an anti-Insulin-Like Growth Factor 1 Receptor (IGF1R) monoclonal antibody; (149) the pathology of the eye is associated with Graves' ophthalmopathy and the therapeutic product is an anti-Insulin-Like Growth Factor 2 Receptor (IGF2R) monoclonal antibody; (150) the pathology of the eye is associated with DME and the therapeutic product is an anti-integrin oligopeptide; (151) the pathology of the eye is associated with DME and the therapeutic product is an anti-Placental Growth Factor (PGF) monoclonal antibody; (152) the pathology of the eye is associated with DME and the therapeutic product is RTP801 siRNA; (153) the pathology of the eye is associated with multiple sclerosis (MS)-associated vision loss and the therapeutic product is ND1; (154) the pathology of the eye is associated with myopia and the therapeutic product is Matrix Metalloproteinase 2 (MMP2) RNAi; (155) the pathology of the eye is associated with X-linked recessive ocular albinism and the therapeutic product is G-Protein Coupled Receptor 143 (GPR143); (156) the pathology of the eye is associated with oculocutaneous albinism type 1 and the therapeutic product is Tyrosinase (TYR); (157) the pathology of the eye is associated with optic neuritis and the therapeutic product is Caspase 2 (CASP2); (158) the pathology of the eye is associated with optic neuritis and the therapeutic product is an anti-Leucine Rich Repeat And Ig Domain Containing Protein 1 (LINGO1) monoclonal antibody; or (159) the pathology of the eye is associated with polypoidal choroidal vasculopathy and the therapeutic product is anti-complement monoclonal antibody or an anti-complement aptamer, wherein the anti-complement monoclonal antibody or aptamer is an anti-complement C1 monoclonal antibody or aptamer, an anti-complement C1q monoclonal antibody/aptamer, an anti-complement C1s monoclonal antibody/aptamer, an anti-complement C2 monoclonal antibody/aptamer, an anti-complement C2a monoclonal antibody or aptamer, an anti-complement C2b monoclonal antibody or aptamer, an anti-complement C3 monoclonal antibody or aptamer, an anti-complement C3a monoclonal antibody or aptamer, an anti-complement C3b monoclonal antibody or aptamer, an anti-complement C4 monoclonal antibody or aptamer, an anti-complement C4a monoclonal antibody or aptamer, an anti-complement C4b monoclonal antibody or aptamer, an anti-complement C5 monoclonal antibody or aptamer, an anti-complement C5a monoclonal antibody or aptamer, an anti-complement C5b monoclonal antibody or aptamer, an anti-complement C6 monoclonal antibody or aptamer, an anti-complement C7 monoclonal antibody or aptamer, an anti-complement C8 monoclonal antibody or aptamer, or an anti-complement C9 monoclonal antibody or aptamers, or preferably an anti-complement C5 antibody.

[0778] In certain embodiments of the methods described herein, the pathology of the eye is associated with X-linked retinitis pigmentosa (XLRP) and the therapeutic product is Retinitis Pigmentosa GTPase Regulator (RPGR). In certain embodiments of any of the foregoing methods, the pathology of the eye is associated with achromatopsia (ACHM) and the therapeutic product is Cyclic Nucleotide Gated Channel Beta 3 (CNGB3). In certain embodiments of any of the foregoing methods, the pathology of the eye is associated with achromatopsia (for example, a CNGA3-linked achromatopsia) and the therapeutic product is Cyclic Nucleotide Gated Channel Alpha 3 (CNGA3). In certain embodiments of any of the foregoing methods, the pathology of the eye is associated with biallelic RPE65 mutation-associated retinal dystrophy and the therapeutic product is Retinoid Isomerohydrolase RPE65 (RPE65).

[0779] In certain embodiments of the methods described herein, (1) the pathology of the eye is associated with Batten-CLN1 and the therapeutic product is Palmitoyl-Protein Thioesterase 1 (PPT1); (2) the pathology of the eye is associated with Batten-CLN2 and the therapeutic product is Tripeptidyl-Peptidase 1 (TPP1); (3) the pathology of the eye is associated with Batten-CLN3 and the therapeutic product is Battenin (CLN3); (4) the pathology of the eye is associated with uveitis and the therapeutic product is an anti-Interleukin 6 (IL6) monoclonal antibody; (5) the pathology of the eye is associated with uveitis and the therapeutic product is an anti-TNF-alpha (TNF) monoclonal antibody; (6) the pathology of the eye is associated with diabetic macular edema (DME) and the therapeutic product is an anti-IL6 monoclonal antibody; (7) the pathology of the eye is associated with red-green color blindness and the therapeutic product is L opsin (OPN1LW); (8) the pathology of the eye is associated with red-green color blindness and the therapeutic product is M opsin (OPN1MW); (9) the pathology of the eye is associated with blue cone monochromacy and the therapeutic product is M opsin (OPN1MW); (10) the pathology of the eye is associated with Leber congenital amaurosis-1 (LCA 1) and the therapeutic product is Guanylate Cyclase 2D, Retinal (GUCY2D); (11) the pathology of the eye is associated with Leber congenital amaurosis-2 (LCA 2) and the therapeutic product is Retinoid Isomerohydrolase RPE65 (RPE65); (12) the pathology of the eye is associated with Leber congenital amaurosis-7 (LCA 7) and the therapeutic product is Cone-Rod Homeobox (CRX); (13) the pathology of the eye is associated with Leber congenital amaurosis-11 (LCA 11) and the therapeutic product is Inosine Monophosphate Dehydrogenase 1 (IMPDH1); (14) the pathology of the eye is associated with Leber congenital amaurosis-12 (LCA 12) and the therapeutic product is Retinal Degeneration 3, GUCY2D regulator (RD3); (15) the pathology of the eye is associated with Leber congenital amaurosis-13 (LCA 13) and the therapeutic product is Retinol Dehydrogenase 12 (RDH12); (16) the pathology of the eye is associated with Leber congenital amaurosis-15 (LCA 15) and the therapeutic product is Tubby Like Protein 1 (TULP1); (17) the pathology of the eye is associated with Leber congenital amaurosis-16 (LCA 16) and the therapeutic product is Potassium Voltage-Gated Channel Subfamily J Member 13 (KCNJ13); (18) the pathology of the eye is associated with Leber's hereditary optic neuropathy (LHON) and the therapeutic product is Mitochondrially Encoded NADH Dehydrogenase 1 (MT-ND1); (19) the pathology of the eye is associated with LHON and the therapeutic product is Mitochondrially Encoded NADH Dehydrogenase 4 (MT-ND4); (20) the pathology of the eye is associated with LHON and the therapeutic product is Mitochondrially Encoded NADH Dehydrogenase 6 (MT-ND6); (21) the pathology of the eye is associated with neuromyelitis optica (NMO) and the therapeutic product is an anti-complement monoclonal antibody or an anti-complement aptamer, wherein the anti-complement monoclonal antibody or aptamer is an anti-complement C1 monoclonal antibody or aptamer, an anti-complement C1q monoclonal antibody or aptamer, an anti-complement C1s monoclonal antibody or aptamer, an anti-complement C2 monoclonal antibody or aptamer, an anti-complement C2a monoclonal antibody or aptamer, an anti-complement C2b monoclonal antibody or aptamer, an anti-complement C3 monoclonal antibody or aptamer, an anti-complement C3a monoclonal antibody or aptamer, an anti-complement C3b monoclonal antibody or aptamer, an anti-complement C4 monoclonal antibody or aptamer, an anti-complement C4a monoclonal antibody or aptamer, an anti-complement C4b monoclonal antibody or aptamer, an anti-complement C5 monoclonal antibody or aptamer, an anti-complement C5a monoclonal antibody or aptamer, an anti-complement C5b monoclonal antibody or aptamer, an anti-complement C6 monoclonal antibody or aptamer, an anti-complement C7 monoclonal antibody or aptamer, an anti-complement C8 monoclonal antibody or aptamer, or an anti-complement C9 monoclonal antibody or aptamers, or preferably an anti-complement C5 antibody; (22) the pathology of the eye is associated with NMO and the therapeutic product is an anti-IL6 monoclonal antibody; (23) the pathology of the eye is associated with uveitis and the therapeutic product is an anti-complement C5 monoclonal antibody; (24) the pathology of the eye is associated with uveitis and the therapeutic product is Angiotensin I Converting Enzyme (ACE); (25) the pathology of the eye is associated with uveitis and the therapeutic product is Interleukin 10 (IL10); (26) the pathology of the eye is associated with uveitis and the therapeutic product is an anti-TNF monoclonal antibody; (27) the pathology of the eye is associated with X-linked retinoschisis (XLRS) and the therapeutic product is Retinoschisin (RS1); (28) the pathology of the eye is associated with Bardet-Biedl syndrome 1 and the therapeutic product is Bardet-Biedl Syndrome 1 (BBS1); (29) the pathology of the eye is associated with Bardet-Biedl syndrome 3 and the therapeutic product is ADP Ribosylation Factor Like GTPase 6 (ARL6); (30) the pathology of the eye is associated with Bardet-Biedl syndrome 5 and the therapeutic product is Bardet-Biedl Syndrome 5 (BBS5); (31) the pathology of the eye is associated with Bardet-Biedl syndrome 6 and the therapeutic product is McKusick-Kaufman Syndrome (MKKS); (32) the pathology of the eye is associated with Bardet-Biedl syndrome 10 and the therapeutic product is Bardet-Biedl Syndrome 10 (BBS10); (33) the pathology of the eye is associated with Bardet-Biedl syndrome 11 and the therapeutic product is Tripartite Motif Containing 32 (TRIM32); (34) the pathology of the eye is associated with Bardet-Biedl syndrome 13 and the therapeutic product is MKS Transition Zone Complex Subunit 1 (MKS1); (35) the pathology of the eye is associated with Bardet-Biedl syndrome 18 and the therapeutic product is BBSome Interacting Protein 1 (BBIP1); (36) the pathology of the eye is associated with Bardet-Biedl syndrome 19 and the therapeutic product is Intraflagellar Transport 27 (IFT27); (37) the pathology of the eye is associated with cone dystrophy and the therapeutic product is Guanylate Cyclase Activator 1A (GUCA1A); (38) the pathology of the eye is associated with retinitis pigmentosa 13 and the therapeutic product is Pre-mRNA Processing Factor 8 (PRPF8); (39) the pathology of the eye is associated with retinitis pigmentosa 37 and the therapeutic product is Nuclear Receptor Subfamily 2 Group E Member 3 (NR2E3); or (40) the pathology of the eye is associated with Best disease and the therapeutic product is Bestrophin 1 (BEST1).

[0780] In certain embodiments of the methods described herein, the pathology of the eye is associated with biallelic RPE65 mutation-associated retinal dystrophy and the therapeutic product is Retinoid Isomerohydrolase RPE65 (RPE65).

[0781] In certain embodiments of the methods described herein, (1) the pathology of the eye is associated with Batten-CLN2 and the therapeutic product is Tripeptidyl-Peptidase 1 (TPP1); (2) the pathology of the eye is associated with Usher's-Type 1 and the therapeutic product is Myosin VIIA (MYO7A); (3) the pathology of the eye is associated with Usher's-Type 1 and the therapeutic product is Cadherin Related 23 (CDH23); (4) the pathology of the eye is associated with Usher's-Type 2 and the therapeutic product is Protocadherin Related 15 (PCDH15); (5) the pathology of the eye is associated with Usher's-Type 2 and the therapeutic product is Usherin (USH2A); (6) the pathology of the eye is associated with Usher's-Type 3 and the therapeutic product is Clarin 1 (CLRN1); (7) the pathology of the eye is associated with Stargardt's and the therapeutic product is ATP Binding Cassette Subfamily A Member 4 (ABCA4); (8) the pathology of the eye is associated with Stargardt's and the therapeutic product is ELOVL Fatty Acid Elongase 4 (ELOVL4); (9) the pathology of the eye is associated with red-green color blindness and the therapeutic product is L opsin (OPN1LW); (10) the pathology of the eye is associated with red-green color blindness and the therapeutic product is M opsin (OPN1MW); (11) the pathology of the eye is associated with blue cone monochromacy and the therapeutic product is M opsin (OPN1MW); (12) the pathology of the eye is associated with Leber congenital amaurosis-1 (LCA 1) and the therapeutic product is Guanylate Cyclase 2D, Retinal (GUCY2D); (13) the pathology of the eye is associated with Leber congenital amaurosis-2 (LCA 2) and the therapeutic product is Retinoid Isomerohydrolase RPE65 (RPE65); (14) the pathology of the eye is associated with Leber congenital amaurosis-4 (LCA 4) and the therapeutic product is Aryl Hydrocarbon Receptor Interacting Protein Like 1 (AIPL1); (15) the pathology of the eye is associated with Leber congenital amaurosis-7 (LCA 7) and the therapeutic product is Cone-Rod Homeobox (CRX); (16) the pathology of the eye is associated with Leber congenital amaurosis-8 (LCA 8) and the therapeutic product is Crumbs Cell Polarity Complex Component 1 (CRB1); (17) the pathology of the eye is associated with Leber congenital amaurosis-9 (LCA 9) and the therapeutic product is Nicotinamide Nucleotide Adenylyltransferase 1 (NMNAT1); (18) the pathology of the eye is associated with Leber congenital amaurosis-10 (LCA 10) and the therapeutic product is Centrosomal Protein 290 (CEP290); (19) the pathology of the eye is associated with Leber congenital amaurosis-11 (LCA 11) and the therapeutic product is Inosine Monophosphate Dehydrogenase 1 (IMPDH1); (20) the pathology of the eye is associated with Leber congenital amaurosis-15 (LCA 15) and the therapeutic product is Tubby Like Protein 1 (TULP1); (21) the pathology of the eye is associated with LHON and the therapeutic product is Mitochondrially Encoded NADH Dehydrogenase 4 (MT-ND4); (22) the pathology of the eye is associated with LHON and the therapeutic product is Mitochondrially Encoded NADH Dehydrogenase 6 (MT-ND6); (23) the pathology of the eye is associated with choroideremia and the therapeutic product is Rab Escort Protein 1 (CHM); (24) the pathology of the eye is associated with X-linked retinoschisis (XLRS) and the therapeutic product is Retinoschisin (RS1); (25) the pathology of the eye is associated with Bardet-Biedl syndrome 1 and the therapeutic product is Bardet-Biedl Syndrome 1 (BBS1); (26) the pathology of the eye is associated with Bardet-Biedl syndrome 6 and the therapeutic product is McKusick-Kaufman Syndrome (MKKS); (27) the pathology of the eye is associated with Bardet-Biedl syndrome 10 and the therapeutic product is Bardet-Biedl Syndrome 10 (BBS10); (28) the pathology of the eye is associated with cone dystrophy and the therapeutic product is Guanylate Cyclase Activator 1A (GUCA1A); (29) the pathology of the eye is associated with optic atrophy and the therapeutic product is OPA1 Mitochondrial Dynamin Like GTPase (OPA1); (30) the pathology of the eye is associated with retinitis pigmentosa 1 and the therapeutic product is RP1 Axonemal Microtubule Associated (RP1); (31) the pathology of the eye is associated with retinitis pigmentosa 2 and the therapeutic product is RP2 Activator of ARL3 GTPase (RP2); (32) the pathology of the eye is associated with retinitis pigmentosa 7 and the therapeutic product is Peripherin 2 (PRPH2); (33) the pathology of the eye is associated with retinitis pigmentosa 11 and the therapeutic product is Pre-mRNA Processing Factor 31(PRPF31); (34) the pathology of the eye is associated with retinitis pigmentosa 13 and the therapeutic product is Pre-mRNA Processing Factor 8 (PRPF8); (35) the pathology of the eye is associated with retinitis pigmentosa 37 and the therapeutic product is Nuclear Receptor Subfamily 2 Group E Member 3 (NR2E3); (36) the pathology of the eye is associated with retinitis pigmentosa 38 and the therapeutic product is MER Proto-Oncogene, Tyrosine Kinase (MERTK); (37) the pathology of the eye is associated with retinitis pigmentosa 40 and the therapeutic product is Phosphodiesterase 6B (PDE6B); (38) the pathology of the eye is associated with retinitis pigmentosa 41 and the therapeutic product is Prominin 1 (PROM1); (39) the pathology of the eye is associated with retinitis pigmentosa 56 and the therapeutic product is Interphotoreceptor Matrix Proteoglycan 2 (IMPG2); (40) the pathology of the eye is associated with petinitis pigmentosa 62 and the therapeutic product is Male Germ Cell Associated Kinase (MAK); (41) the pathology of the eye is associated with retinitis pigmentosa 80 and the therapeutic product is Intraflagellar Transport 140 (IFT140); or (42) the pathology of the eye is associated with Best disease and the therapeutic product is Bestrophin 1 (BEST1).

[0782] In certain embodiments of the methods described herein, the pathology of the eye is associated with X-linked retinitis pigmentosa (XLRP) and the therapeutic product is Retinitis Pigmentosa GTPase Regulator (RPGR). In certain embodiments of any of the foregoing methods, the pathology of the eye is associated with achromatopsia and the therapeutic product is Cyclic Nucleotide Gated Channel Beta 3 (CNGB3); or achromatopsia (for example, a CNGA3-linked achromatopsia) and the therapeutic product is Cyclic Nucleotide Gated Channel Alpha 3 (CNGA3).

[0783] In certain embodiments of the methods described herein, the therapeutic product is a protein, or the therapeutic product is an antibody against a protein, which protein has at least 70%, 75%, 80%, 85% 90%, 91%, 92%, 93%, 94%, 95%, 96%, 97%, 98%, 99% or 100% sequence identity to an amino acid sequence selected from SEQ ID NOs: 52-321 provided in Section 7. In a specific embodiment of the methods described herein, the therapeutic product is a protein, or the therapeutic product is an antibody against a protein, which protein has 100% sequence identity to an amino acid sequence selected from SEQ ID NOs: 52-321 provided in Section 7.

### (j) Constructs

[0784] In certain embodiments of the methods described herein, the recombinant vectors provided herein comprise the following elements in the following order: a) a constitutive or a hypoxia-inducible promoter sequence, and b) a sequence encoding the therapeutic product. In certain embodiments, the sequence encoding the therapeutic product comprises multiple ORFs separated by IRES elements. In certain embodiments, the sequence encoding the therapeutic product comprises multiple subunits in one ORF separated by F/F2A sequences.

[0785] In certain embodiments of the methods described herein, the recombinant vectors provided herein comprise the following elements in the following order: a) a first ITR sequence, b) a first linker sequence, c) a constitutive or a hypoxia-inducible promoter sequence, d) a second linker sequence, e) an intron sequence, f) a third linker sequence, g) a first UTR sequence, h) a sequence encoding the therapeutic product, i) a second UTR sequence, j) a fourth linker sequence, k) a poly A sequence, 1) a fifth linker sequence, and m) a second ITR sequence.

### (k) Manufacture and Testing of Vectors

[0786] The recombinant vectors (for example, recombinant viral vectors) provided herein may be manufactured using host cells. The recombinant vectors provided herein may be manufactured using mammalian host cells, for example, A549, WEHI, 10T1/2, BHK, MDCK, COS 1, COST, BSC 1, BSC 40, BMT 10, VERO, W138, HeLa, 293, Saos, C2C12, L, HT1080, HepG2, primary fibroblast, hepatocyte, and myoblast cells. The recombinant vectors provided herein may be manufactured using host cells from human, monkey, mouse, rat, rabbit, or hamster.

[0787] For recombinant viral vectors, the host cells are stably transformed with the sequences encoding the therapeutic product and associated elements (i.e., the vector genome), and the means of producing viruses in the host cells, for example, the replication and capsid genes (e.g., the rep and cap genes of AAV). For a method of producing recombinant AAV vectors with AAV8 capsids, see Section IV of the Detailed Description of U.S. Pat. No. 7,282,199 B2, which is incorporated herein by reference in its entirety. Genome copy titers of said vectors may be determined, for example, by TAQMAN® analysis. Virions may be recovered, for example, by CsCl₂ sedimentation.

[0788] In vitro assays, e.g., cell culture assays, can be used to measure therapeutic product expression from a vector described herein, thus indicating, e.g., potency of the vector. For example, the PER.C6® Cell Line (Lonza), a cell line derived from human embryonic retinal cells, or retinal pigment epithelial cells, e.g., the retinal pigment epithelial cell line hTERT RPE-1 (available from ATCC®), can be used to assess therapeutic product expression. Once expressed, characteristics of the expressed therapeutic product can be determined, including determination of the post-translational modification patterns. In addition, benefits resulting from post-translational modification of the cell-expressed therapeutic product can be determined using assays known in the art.

### (l) Compositions

[0789] Compositions are described comprising a recombinant vector encoding a therapeutic product described herein and a suitable carrier. A suitable carrier (e.g., for suprachoroidal, subretinal, juxtascleral, intravitreal, subconjunctival, and/or intraretinal administration) would be readily selected by one of skill in the art.

[0790] 6.1.3 Gene Therapy

[0791] Methods are described for the administration of a therapeutically effective amount of a recombinant vector (i.e., a recombinant viral vector or a DNA expression construct) to human subjects having pathology of the eye. In particular, methods are described for the administration of a therapeutically effective amount of a recombinant vector (i.e., a recombinant viral vector or a DNA expression construct) to human subjects via one of the following approaches: (1) subretinal administration without vitrectomy (for example, administration to subretinal space via the suprachoroidal space or via peripheral injection), (2) suprachoroidal administration, (3) administration to the outer space of the sclera (i.e., juxtascleral administration); (4) subretinal administration accompanied by vitrectomy; (5) intravitreal administration, and (6) subconjunctival administration.

[0792] In certain embodiments, delivery to the subretinal or suprachoroidal space can be performed using the methods and/or devices described and disclosed in International Publication Nos. WO 2016/042162, WO 2017/046358, WO 2017/158365, and WO 2017/158366, each of which is incorporated by reference in its entirety.

### (a) Target Patient Populations

[0793] In certain embodiments of the methods described herein, the methods provided herein are for the administration to patients having a pathology of the eye associated with: (1) neovascular age-related macular degeneration (nAMD); (2) dry age-related macular degeneration (dry AMD); (3) retinal vein occlusion (RVO) diabetic macular edema (DME); (4) diabetic retinopathy (DR); (5) Batten-CLN1; (6) Batten-CLN2; (7) Batten-CLN3; (8) Batten-CLN6; (8) Batten-CLN7; (9) Usher's-Type 1; (10) Usher's-Type 2; (11) Usher's-Type 3; (12) Stargardt's disease; (13) uveitis; (14) red-green color blindness; (15) blue cone monochromacy; (16) Leber congenital amaurosis-1 (LCA 1); (17) Leber congenital amaurosis-2 (LCA 2); (18)) Leber congenital amaurosis-3 (LCA 3); (19) Leber congenital amaurosis-4 (LCA 4); (20) Leber congenital amaurosis-5 (LCA 5); (21) Leber congenital amaurosis-6 (LCA 6); (22) Leber congenital amaurosis-7 (LCA 7); (23) Leber congenital amaurosis-8 (LCA 8); (24) Leber congenital amaurosis-9 (LCA 9); (25) Leber congenital amaurosis-10 (LCA 10); (26) Leber congenital amaurosis-11 (LCA 11); (27) Leber congenital amaurosis-12 (LCA 12); (28) Leber congenital amaurosis-13 (LCA 13); (29) Leber congenital amaurosis-14 (LCA 14); (30) Leber congenital amaurosis-15 (LCA 15); (30) Leber congenital amaurosis-16 (LCA 16); (31) Leber's hereditary optic neuropathy (LHON); (31) neuromyelitis optica (WO); (32) choroideremia; (33) X-linked retinoschisis (XLRS); (34) Bardet-Biedl syndrome 1; (35) Bardet-Biedl syndrome 2; (36) Bardet-Biedl syndrome 3; (37) Bardet-Biedl syndrome 4; (38) Bardet-Biedl syndrome 5; (39) Bardet-Biedl syndrome 6; (40) Bardet-Biedl syndrome 7; (41) Bardet-Biedl syndrome 8; (42) Bardet-Biedl syndrome 9; (43) Bardet-Biedl syndrome 10; (44) Bardet-Biedl syndrome 11; (45) Bardet-Biedl syndrome 12; (46) Bardet-Biedl syndrome 13; (47) Bardet-Biedl syndrome 14; (48) Bardet-Biedl syndrome 15; (49) Bardet-Biedl syndrome 16; (50) Bardet-Biedl syndrome 17; (51) Bardet-Biedl syndrome 18; (52) Bardet-Biedl syndrome 19; (53) cone dystrophy; (54) optic atrophy; (55) retinitis pigmentosa 1; (56) retinitis pigmentosa 2; (57) retinitis pigmentosa 7; (58) retinitis pigmentosa 11; (58) retinitis pigmentosa 12; (59) retinitis pigmentosa 13; (60) retinitis pigmentosa 25; (61) retinitis pigmentosa 28; (62) retinitis pigmentosa 37; (63) retinitis pigmentosa 38; (64) retinitis pigmentosa 40; (65) retinitis pigmentosa 41 (66) retinitis pigmentosa 43; (67) retinitis pigmentosa 56; (68) petinitis pigmentosa 62; (69) retinitis pigmentosa 80; (70) age-related retinal ganglion cell (RGC) degeneration; (71) Best disease; (72) glaucoma; (73) retinitis pigmentosa that is associated with rhodopsin mutations; (74) retinitis pigmentosa; (75) autosomal recessive retinitis pigmentosa; (76) corneal neovascularization; (77) diabetic retinopathy; (78) Graves' ophthalmopathy; (79) multiple sclerosis (MS)-associated vision loss; (80) myopia; (81) X-linked recessive ocular albinism; (82) oculocutaneous albinism type 1; (83) optic neuritis; (84) polypoidal choroidal vasculopathy; (85) X-linked retinitis pigmentosa (XLRP); (86) achromatopsia (ACHM); or (87) biallelic RPE65 mutation-associated retinal dystrophy.

[0794] In certain embodiments of the methods described herein, the human subject has a BCVA that is ≤20/20 and ≥20/400. In another specific embodiment, the human subject has a BCVA that is ≤20/63 and ≥20/400. [00152] In certain embodiments, the subject treated in accordance with the methods described herein is female. In certain embodiments, the subject treated in accordance with the methods described herein is male. In certain embodiments, the subject treated in accordance with the methods described herein is a child. In certain embodiments, the subject treated in accordance with the methods described herein is 1 month old, 2 months old, 3 months old, 4 months old, 5 months old, 6 months old, 7 months old, 8 months old, 9 months old, 10 months old, 11 months old, 1 year old, 1.5 years old, 2 years old, 2.5 years old, 3 years old, 3.5 years old, 4 years old, 4.5 years old, or 5 years old. In certain embodiments, the subject treated in accordance with the methods described herein is less than 1.5 months old, 2 months old, 3 months old, 4 months old, 5 months old, 6 months old, 7 months old, 8 months old, 9 months old, 10 months old, 11 months old, 1 year old, 1.5 years old, 2 years old, 2.5 years old, 3 years old, 3.5 years old, 4 years old, 4.5 years old, or less than 5 years old. In another specific embodiment, the subject treated in accordance with the methods described herein is 1-2 months old, 2-3 months old, 3-4 months old, 4-5 months old, 5-6 months old, 6-7 months old, 7-8 months old, 8-9 months old, 9-10 months old, 10-11 months old, 11 months to 1 year old, 1-1.5 years old, 1.5-2 years old, 2-2.5 years old, 2.5-3 years old, 3-3.5 years old, 3.5-4 years old, 4-4.5 years old, or 4.5-5 years old. In another specific embodiment, the subject treated in accordance with the methods described herein is 6 months to 5 years old.

### (b) Dosage and Mode of Administration

[0795] In certain embodiments of the method described herein, therapeutically effective doses of the recombinant vector are administered (1) to the subretinal space without vitrectomy (e.g., via the suprachoroidal space or via peripheral injection), (2) to the suprachoroidal space, (3) to the outer space of the sclera (i.e., juxtascleral administration), (4) to the subretinal space via vitrectomy, or (5) to the vitreous cavity, in a volume ranging from 50-100 μl or 100-500 μl, preferably 100-300 μl, and most preferably, 250 μl, depending on the administration method. In certain embodiments, therapeutically effective doses of the recombinant vector are administered suprachoroidally in a volume of 100 μl or less, for example, in a volume of 50-100 μl. In certain embodiments, therapeutically effective doses of the recombinant vector are administered to the outer surface of the sclera (e.g., by a posterior juxtascleral depot procedure) in a volume of 500 μl or less, for example, in a volume of 10-20 μl 20-50 μl 50-100 μl 100-200 μl 200-300 μl, 300-400 μl, or 400-500 μl. In certain embodiments, therapeutically effective doses of the recombinant vector are administered to the subretinal space via peripheral injection in a volume of 50-100 μl or 100-500 preferably 100-300 μl and most preferably, 250 μl.

[0796] In certain embodiment, described herein is an micro volume injector delivery system, which is manufactured by Altaviz (see FIGS. 7A and 7B) (see, e.g. International Patent Application Publication No. WO 2013/177215, United States Patent Application Publication No. 2019/0175825, and United States Patent Application Publication No. 2019/0167906) that can be used for any administration route described herein for eye administration. The micro volume injector delivery system may include a gas-powered module providing high force delivery and improved precision, as described in United States Patent Application Publication No. 2019/0175825 and United States Patent Application Publication No. 2019/0167906. In addition, the micro volume injector delivery system may include a hydraulic drive for providing a consistent dose rate, and a low-force activation lever for controlling the gas-powered module and, in turn, the fluid delivery.

[0797] In certain embodiment, the micro volume injector delivery system can be used for micro volume injector is a micro volume injector with dose guidance and can be used with, for example, a suprachoroidal needle (for example, the Clearside® needle), a subretinal needle, an intravitreal needle, a juxtascleral needle, a subconjunctival needle, and/or intraretinal needle. The benefits of using micro volume injector include: (a) more controlled delivery (for example, due to having precision injection flow rate control and dose guidance), (b) single surgeon, single hand, one finger operation; (c) pneumatic drive with 10 μL increment dosage; (d) divorced from the vitrectomy machine; (e) 400 μL syringe dose; (f) digitally guided delivery; (g) digitally recorded delivery; and (h) agnostic tip (for example, the MedOne 38 g needle and the Dorc 41 g needle can be used for subretinal delivery, while the Clearside® needle and the Visionisti OY adaptor can be used for subretinal delivery).

[0798] In certain embodiments of the methods described herein, the recombinant vector is administered suprachoroidally (e.g., by suprachoroidal injection). In a specific embodiment, suprachoroidal administration (e.g., an injection into the suprachoroidal space) is performed using a suprachoroidal drug delivery device. Suprachoroidal drug delivery devices are often used in suprachoroidal administration procedures, which involve administration of a drug to the suprachoroidal space of the eye (see, e.g., Hariprasad, 2016, Retinal Physician 13: 20-23; Goldstein, 2014, Retina Today 9(5): 82-87; Baldassarre et al., 2017; each of which is incorporated by reference herein in its entirety). The suprachoroidal drug delivery devices that can be used to deposit the recombinant vector in the suprachoroidal space according to the invention described herein include, but are not limited to, suprachoroidal drug delivery devices manufactured by Clearside® Biomedical, Inc. (see, for example, Hariprasad, 2016, Retinal Physician 13: 20-23) and MedOne suprachoroidal catheters. In another embodiment, the suprachoroidal drug delivery device that can be used in accordance with the methods described herein comprises the micro volume injector delivery system, which is manufactured by Altaviz (see FIGS. 7A and 7B) (see, e.g. International Patent Application Publication No. WO 2013/177215, United States Patent Application Publication No. 2019/0175825, and United States Patent Application Publication No. 2019/0167906) that can be used for any administration route described herein for eye administration. The micro volume injector delivery system may include a gas-powered module providing high force delivery and improved precision, as described in United States Patent Application Publication No. 2019/0175825 and United States Patent Application Publication No. 2019/0167906. In addition, the micro volume injector delivery system may include a hydraulic drive for providing a consistent dose rate, and a low-force activation lever for controlling the gas-powered module and, in turn, the fluid delivery.

[0799] The micro volume injector is a micro volume injector with dose guidance and can be used with, for example, a suprachoroidal needle (for example, the Clearside® needle) or a subretinal needle. The benefits of using micro volume injector include: (a) more controlled delivery (for example, due to having precision injection flow rate control and dose guidance), (b) single surgeon, single hand, one finger operation; (c) pneumatic drive with 10 μL increment dosage; (d) divorced from the vitrectomy machine; (e) 400 μL syringe dose; (f) digitally guided delivery; (g) digitally recorded delivery; and (h) agnostic tip (for example, the MedOne 38 g needle and the Dorc 41 g needle can be used for subretinal delivery, while the Clearside® needle and the Visionisti OY adaptor can be used for suprachoroidal delivery). In another embodiment, the suprachoroidal drug delivery device that can be used in accordance with the methods described herein is a tool that comprises a normal length hypodermic needle with an adaptor (and preferably also a needle guide) manufactured by Visionisti OY, which adaptor turns the normal length hypodermic needle into a suprachoroidal needle by controlling the length of the needle tip exposing from the adapter (see FIG. 8) (see, for example, U.S. Design Pat. No. D878,575; and International Patent Application. Publication No. WO/2016/083669) In a specific embodiment, the suprachoroidal drug delivery device is a syringe with a 1 millimeter 30 gauge needle (see FIG. 1). During an injection using this device, the needle pierces to the base of the sclera and fluid containing drug enters the suprachoroidal space, leading to expansion of the suprachoroidal space. As a result, there is tactile and visual feedback during the injection. Following the injection, the fluid flows posteriorly and absorbs dominantly in the choroid and retina. This results in the production of therapeutic product from all retinal cell layers and choroidal cells. Using this type of device and procedure allows for a quick and easy in-office procedure with low risk of complications. A max volume of 100 μl can be injected into the suprachoroidal space.

[0800] In certain embodiments of the methods described herein, the recombinant vector is administered subretinally via vitrectomy. Subretinal administration via vitrectomy is a surgical procedure performed by trained retinal surgeons that involves a vitrectomy with the subject under local anesthesia, and subretinal injection of the gene therapy into the retina (see, e.g., Campochiaro et al., 2017, Hum Gen Ther 28(1):99-111, which is incorporated by reference herein in its entirety).

[0801] In certain embodiments of the methods described herein, the recombinant vector is administered subretinally without vitrectomy.

[0802] In certain embodiments of the methods described herein, the subretinal administration without vitrectomy is performed via the suprachoroidal space by use of a subretinal drug delivery device. In certain embodiments, the subretinal drug delivery device is a catheter which is inserted and tunneled through the suprachoroidal space around to the back of the eye during a surgical procedure to deliver drug to the subretinal space (see FIG. 2). This procedure allows the vitreous to remain intact and thus, there are fewer complication risks (less risk of gene therapy egress, and complications such as retinal detachments and macular holes), and without a vitrectomy, the resulting bleb may spread more diffusely allowing more of the surface area of the retina to be transduced with a smaller volume. The risk of induced cataract following this procedure is minimized, which is desirable for younger patients. Moreover, this procedure can deliver bleb under the fovea more safely than the standard transvitreal approach, which is desirable for patients with inherited retinal diseases effecting central vision where the target cells for transduction are in the macula. This procedure is also favorable for patients that have neutralizing antibodies (Nabs) to AAVs present in the systemic circulation which may impact other routes of delivery (such as suprachoroidal and intravitreal). Additionally, this method has shown to create blebs with less egress out the retinotomy site than the standard transvitreal approach. The subretinal drug delivery device originally manufactured by Janssen Pharmaceuticals, Inc. now by Orbit Biomedical Inc. (see, for example, Subretinal Delivery of Cells via the Suprachoroidal Space: Janssen Trial. In: Schwartz et al. (eds) Cellular Therapies for Retinal Disease, Springer, Cham; International Patent Application Publication No. WO 2016/040635 A1) can be used for such purpose.

[0803] In another specific embodiment, the subretinal administration without vitrectomy is performed via peripheral injection into the retina (i.e., peripheral to the optic disc, fovea and macula located in the back of the eye, see FIG. 3). This can be accomplished by transvitreal injection.

[0804] In one embodiment, a sharp needle is inserted into the sclera via the superior or inferior side of the eye (e.g., at the 2 or 10 o'clock position) so that the needle passes all the way through the vitreous to inject the retina on the other side. In another embodiment, a trochar is inserted into the sclera to allow a subretinal cannula to be inserted into the eye. The cannula is inserted through the trochar and through the vitreous to the area of desired injection. In either embodiment, the recombinant vector is injected in the subretinal space, forming a bleb containing the recombinant vector on the opposite inner surface of the eye. Successful injection is confirmed by the appearance of a dome shaped retinal detachment/retinal bleb.

[0805] A self-illuminating lens may be used as a light source for the transvitreal administration (see e.g., Chalam et al., 2004, Ophthalmic Surgery and Lasers 35: 76-77, which is incorporated by reference herein in its entirety). Alternatively, one or more trochar(s) can be placed for light (or infusion) if desired. In yet another embodiment, an optic fiber chandelier can be utilized via a trocar for visualizing the subretinal injection.

[0806] One, two, or more peripheral injections can be performed to administer the recombinant vector. In this way, one, two, or more blebs containing recombinant vector can be made in the subretinal space peripheral to the optic disc, fovea and macula. Surprisingly, while administration of the recombinant vector is confined to the peripherally injected blebs, expression of the therapeutic product throughout the retina can be detected when using this approach.

[0807] In a specific embodiment, the intravitreal administration is performed with a intravitreal drug delivery device that comprises the micro volume injector delivery system, which is manufactured by Altaviz (see FIGS. 7A and 7B) (see, e.g. International Patent Application Publication No. WO 2013/177215), United States Patent Application Publication No. 2019/0175825, and United States Patent Application Publication No. 2019/0167906) that can be used for any administration route described herein for eye administration. The micro volume injector delivery system may include a gas-powered module providing high force delivery and improved precision, as described in United States Patent Application Publication No. 2019/0175825 and United States Patent Application Publication No. 2019/0167906. In addition, the micro volume injector delivery system may include a hydraulic drive for providing a consistent dose rate, and a low-force activation lever for controlling the gas-powered module and, in turn, the fluid delivery. The micro volume injector is a micro volume injector with dose guidance and can be used with, for example, a intravitreal needle. The benefits of using micro volume injector include: (a) more controlled delivery (for example, due to having precision injection flow rate control and dose guidance), (b) single surgeon, single hand, one finger operation; (c) pneumatic drive with 10 μL increment dosage; (d) divorced from the vitrectomy machine; (e) 400 μL syringe dose; (f) digitally guided delivery; (g) digitally recorded delivery; and (h) agnostic tip (for example, the MedOne 38 g needle and the Dorc 41 g needle can be used for subretinal delivery, while the Clearside® needle and the Visionisti OY adaptor can be used for subretinal delivery).

[0808] In certain embodiments, the peripheral injection results in uniform expression of the therapeutic product throughout the eye (e.g. the expression level at the site of injection varies by less than 5%, 10%, 20%, 30%, 40%, or 50% as compared to the expression level at other areas of the eye). The expression of the therapeutic product throughout the eye can be measured by any method known in the art for such a purpose, for example, by whole mount immunofluorescent staining of the eye or retina, or by immunofluorescent staining on frozen ocular sections.

[0809] In the event that a transvitreal injection results in loss of the recombinant vector in the vitreous instead of the subretinal space, an optional vitrectomy can be performed to remove the recombinant vector that was injected into the vitreous. A subretinal injection with vitrectomy can then be performed to deliver the 250 μl of recombinant vector into the subretinal space. Alternatively, if some of the injected recombinant vector is deposited into the vitreous and a vitrectomy is not performed to remove the recombinant vector from the vitreous, a catheter lined with immobilized (e.g., covalently bound) anti-AAV antibodies (e.g., anti AAV8 antibodies), can be inserted into the vitreous to capture and remove excess recombinant vector from the vitreous.

[0810] In a specific embodiment, the subretinal administration is performed with a subretinal drug delivery device that comprises the micro volume injector delivery system, which is manufactured by Altaviz (see FIGS. 7A and 7B) (see, e.g. International Patent Application Publication No. WO 2013/177215, United States Patent Application Publication No. 2019/0175825, and United States Patent Application Publication No. 2019/0167906) that can be used for any administration route described herein for eye administration. The micro volume injector delivery system may include a gas-powered module providing high force delivery and improved precision, as described in United States Patent Application Publication No. 2019/0175825 and United States Patent Application Publication No. 2019/0167906. In addition, the micro volume injector delivery system may include a hydraulic drive for providing a consistent dose rate, and a low-force activation lever for controlling the gas-powered module and, in turn, the fluid delivery. Micro volume injector is a micro volume injector with dose guidance and can be used with, for example, a subretinal needle. The benefits of using micro volume injector include: (a) more controlled delivery (for example, due to having precision injection flow rate control and dose guidance), (b) single surgeon, single hand, one finger operation; (c) pneumatic drive with 10 μL increment dosage; (d) divorced from the vitrectomy machine; (e) 400 μL syringe dose; (f) digitally guided delivery; (g) digitally recorded delivery; and (h) agnostic tip (for example, the MedOne 38 g needle and the Dorc 41 g needle can be used for subretinal delivery, while the Clearside® needle and the Visionisti OY adaptor can be used for suprachoroidal delivery).

[0811] In certain embodiments, the recombinant vector is administered to the outer surface of the sclera (for example, by the use of a juxtascleral drug delivery device that comprises a cannula, whose tip can be inserted and kept in direct apposition to the scleral surface). In a specific embodiment, administration to the outer surface of the sclera is performed using a posterior juxtascleral depot procedure, which involves drug being drawn into a blunt-tipped curved cannula and then delivered in direct contact with the outer surface of the sclera without puncturing the eyeball. In particular, following the creation of a small incision to bare sclera, the cannula tip is inserted (see FIG. 4A). The curved portion of the cannula shaft is inserted, keeping the cannula tip in direct apposition to the scleral surface (see FIGS. 4B-4D). After complete insertion of the cannula (FIG. 4D), the drug is slowly injected while gentle pressure is maintained along the top and sides of the cannula shaft with sterile cotton swabs. This method of delivery avoids the risk of intraocular infection and retinal detachment, side effects commonly associated with injecting therapeutic agents directly into the eye.

[0812] In a specific embodiment, the juxtascleral administration is performed with a juxtascleral drug delivery device that comprises the micro volume injector delivery system, which is manufactured by Altaviz (see FIGS. 7A and 7B) (see, e.g. International Patent Application Publication No. WO 2013/177215, United States Patent Application Publication No. 2019/0175825, and United States Patent Application Publication No. 2019/0167906) that can be used for any administration route described herein for eye administration. The micro volume injector delivery system may include a gas-powered module providing high force delivery and improved precision, as described in United States Patent Application Publication No. 2019/0175825 and United States Patent Application Publication No. 2019/0167906. In addition, the micro volume injector delivery system may include a hydraulic drive for providing a consistent dose rate, and a low-force activation lever for controlling the gas-powered module and, in turn, the fluid delivery. Micro Volume Injector is a micro volume injector with dose guidance and can be used with, for example, a juxtascleral needle. The benefits of using micro volume injector include: (a) more controlled delivery (for example, due to having precision injection flow rate control and dose guidance), (b) single surgeon, single hand, one finger operation; (c) pneumatic drive with 10 μL increment dosage; (d) divorced from the vitrectomy machine; (e) 400 μL syringe dose; (f) digitally guided delivery; (g) digitally recorded delivery; and (h) agnostic tip.

[0813] In certain embodiments, an infrared thermal camera can be used to detect changes in the thermal profile of the ocular surface after the administering of a solution which is cooler than body temperature to detect changes in the thermal profile of the ocular surface that allows for visualization of the spread of the solution, e.g., within the SCS, and can potentially determine whether the administration was successfully completed. This is because in certain embodiments the formulation containing the recombinant vector to be administered is initially frozen, brought to room temperature (68-72° F.), and thawed for a short period of time (e.g., at least 30 minutes) before administration, and thus the formulation is colder than the human eye (about 92° F.) (and sometimes even colder than room temperature) at the time of injection. The drug product is typically used within 4 hours of thaw and the warmest the solution would be is room temperature. In a preferred embodiment, the procedure is videoed with infrared video.

[0814] Infrared thermal cameras can detect small changes in temperature. They capture infrared energy through a lens and convert the energy into an electronic signal. The infrared light is focused onto an infrared sensor array which converts the energy into a thermal image. The infrared thermal camera can be used for any method of administration to the eye, including any administration route described herein, for example, suprachoroidal administration, subretinal administration, subconjunctival administration, intravitreal administration, or administration with the use of a slow infusion catheter in to the suprachoroidal space. In a specific embodiment, the infrared thermal camera is an FLIR T530 infrared thermal camera. The FLIR T530 infrared thermal camera can capture slight temperature differences with an accuracy of ±3.6° F. The camera has an infrared resolution of 76,800 pixels. The camera also utilizes a 24° lens capturing a smaller field of view. A smaller field of view in combination with a high infrared resolution contributes to more detailed thermal profiles of what the operator is imaging. However, other infrared camera can be used that have different abilities and accuracy for capturing slight temperature changes, with different infrared resolutions, and/or with different degrees of lens.

[0815] In a specific embodiment, the infrared thermal camera is an FLIR T420 infrared thermal camera. In a specific embodiment, the infrared thermal camera is an FLIR T440 infrared thermal camera. In a specific embodiment, the infrared thermal camera is an Fluke Ti400 infrared thermal camera. In a specific embodiment, the infrared thermal camera is an FLIRE60 infrared thermal camera. In a specific embodiment, the infrared resolution of the infrared thermal camera is equal to or greater than 75,000 pixels. In a specific embodiment, the thermal sensitivity of the infrared thermal camera is equal to or smaller than 0.05° C. at 30° C. In a specific embodiment, the field of view (FOV) of the infrared thermal camera is equal to or lower than 25°×25°.

[0816] In certain embodiments, an iron filer is used with the infrared thermal camera to detect changes in the thermal profile of the ocular surface. In a preferred embodiment, the use of an iron filter is able to a generate pseudo-color image, wherein the warmest or high temperature parts are colored white, intermediate temperatures are reds and yellows, and the coolest or low temperature parts are black. In certain embodiments, other types of filters can also be used to generate pseudo-color images of the thermal profile.

[0817] The thermal profile for each administration method can be different. For example, in one embodiment, a successful suprachoroidal injection can be characterized by: (a) a slow, wide radial spread of the dark color, (b) very dark color at the beginning, and (c) a gradual change of injectate to lighter color, i.e., a temperature gradient noted by a lighter color. In one embodiment, an unsuccessful suprachoroidal injection can be characterized by: (a) no spread of the dark color, and (b) a minor change in color localized to the injection site without any distribution. In certain embodiments, the small localized temperature drop is result from cannula (low temperature) touching the ocular tissues (high temperature). In one embodiment, a successful intravitreal injection can be characterized by: (a) no spread of the dark color, (b) an initial change to very dark color localized to the injection site, and (c) a gradual and uniform change of the entire eye to darker color. In one embodiment, an extraocular efflux can be characterized by: (a) quick flowing streams on outside on the exterior surface of the eye, (b) very dark color at the beginning, and (c) a quick change to lighter color.

[0818] Because the therapeutic product is continuously produced (under the control of a constitutive promoter or induced by hypoxic conditions when using an hypoxia-inducible promoter), maintenance of lower concentrations can be effective. Vitreous humour concentrations can be measured directly in patient samples of fluid collected from the vitreous humour or the anterior chamber, or estimated and/or monitored by measuring the patient's serum concentrations of the therapeutic product—the ratio of systemic to vitreal exposure to the therapeutic product is about 1:90,000. (E.g., see, vitreous humor and serum concentrations of ranibizumab reported in Xu L, et al., 2013, Invest. Opthal. Vis. Sci. 54: 1616-1624, at p. 1621 and Table 5 at p. 1623, which is incorporated by reference herein in its entirety).

[0819] In certain embodiments, dosages are measured by genome copies per ml or the number of genome copies administered to the eye of the patient (e.g., administered suprachoroidally, subretinally, intravitreally, juxtasclerally, subconjunctivally, and/or intraretinally. In certain embodiments, 1×10⁹ genome copies per ml to 1×10¹⁵ genome copies per ml are administered. In a specific embodiment, 1×10⁹ genome copies per ml to 1×10¹⁰ genome copies per ml are administered. In another specific embodiment, 1×10¹⁰ genome copies per ml to 1×10¹¹ genome copies per ml are administered. In another specific embodiment, 1×10¹⁰ to 5×10¹¹ genome copies are administered. In another specific embodiment, 1×10¹¹ genome copies per ml to 1×10¹² genome copies per ml are administered. In another specific embodiment, 1×10¹² genome copies per ml to 1×10¹³ genome copies per ml are administered. In another specific embodiment, 1×10¹³ genome copies per ml to 1×10¹⁴ genome copies per ml are administered. In another specific embodiment, 1×10¹⁴ genome copies per ml to 1×10¹⁵ genome copies per ml are administered. In another specific embodiment, about 1×10⁹ genome copies per ml are administered. In another specific embodiment, about 1×10¹⁰ genome copies per ml are administered. In another specific embodiment, about 1×10¹¹ genome copies per ml are administered. In another specific embodiment, about 1×10¹² genome copies per ml are administered. In another specific embodiment, about 1×10¹³ genome copies per ml are administered. In another specific embodiment, about 1×10¹⁴ genome copies per ml are administered. In another specific embodiment, about 1×10¹⁵ genome copies per ml are administered. In certain embodiments, 1×10⁹ to 1×10¹⁵ genome copies are administered. In a specific embodiment, 1×10⁹ to 1×10¹⁰ genome copies are administered. In another specific embodiment, 1×10¹⁰ to 1×10¹¹ genome copies are administered. In another specific embodiment, 1×10¹⁰ to 5×10¹¹ genome copies are administered. In another specific embodiment, 1×10¹¹ to 1×10¹² genome copies are administered. In another specific embodiment, 1×10¹² to 1×10¹³ genome copies are administered. In another specific embodiment, 1×10¹³ to 1×10¹⁴ genome copies are administered. In another specific embodiment, 1×10¹³ to 1×10¹⁴ genome copies are administered. In another specific embodiment, 1×10¹⁴ to 1×10¹⁵ genome copies are administered. In another specific embodiment, about 1×10⁹ genome copies are administered. In another specific embodiment, about 1×10¹⁰ genome copies are administered. In another specific embodiment, about 1×10¹¹ genome copies are administered. In another specific embodiment, about 1×10¹² genome copies are administered. In another specific embodiment, about 1×10¹³ genome copies are administered. In another specific embodiment, about 1×10¹⁴ genome copies are administered. In another specific embodiment, about 1×10¹⁵ genome copies are administered. In certain embodiments, about 3.0×10¹³ genome copies per eye are administered. In certain embodiments, up to 3.0×10¹³ genome copies per eye are administered.

[0820] In certain embodiments, about 6.0×10¹⁰ genome copies per eye are administered. In certain embodiments, about 1.6×10¹¹ genome copies per eye are administered. In certain embodiments, about 2.5×10¹¹ genome copies per eye are administered. In certain embodiments, about 5.0×10¹¹ genome copies per eye are administered. In certain embodiments, about 3×10¹² genome copies per eye are administered. In certain embodiments, about 1.0×10¹² genome copies per ml per eye are administered. In certain embodiments, about 2.5×10¹² genome copies per ml per eye are administered.

[0821] In certain embodiments, about 6.0×10¹⁰ genome copies per eye are administered by subretinal injection. In certain embodiments, about 1.6×10¹¹ genome copies per eye are administered by subretinal injection. In certain embodiments, about 2.5×10¹¹ genome copies per eye are administered by subretinal injection. In certain embodiments, about 3.0×10¹³ genome copies per eye are administered by subretinal injection. In certain embodiments, up to 3.0×10¹³ genome copies per eye are administered by subretinal injection.

[0822] In certain embodiments, about 2.5×10¹¹ genome copies per eye are administered by suprachoroidal injection. In certain embodiments, about 5.0×10¹¹ genome copies per eye are administered by suprachoroidal injection. In certain embodiments, about 3×10¹² genome copies per eye are administered by suprachoroidal injection. In certain embodiments, about 2.5×10¹¹ genome copies per eye are administered by a single suprachoroidal injection. In certain embodiments, about 5.0×10¹¹ genome copies per eye are administered by double suprachoroidal injections. In certain embodiments, about 3.0×10¹³ genome copies per eye are administered by suprachoroidal injection. In certain embodiments, up to 3.0×10¹³ genome copies per eye are administered by suprachoroidal injection. In certain embodiments, about 2.5×10¹² genome copies per ml per eye are administered by a single suprachoroidal injection in a volume of 100 μl. In certain embodiments, about 2.5×10¹² genome copies per ml per eye are administered by double suprachoroidal injections, wherein each injection is in a volume of 100 μl.

[0823] As used herein and unless otherwise specified, the term “about” means within plus or minus 10% of a given value or range. In certain embodiments, the term “about” encompasses the exact number recited.

### (c) Sampling and Monitoring of Efficacy

[0824] In certain embodiments, when the human subject has disease manifestations in both the CNS and the eye (for example, when the human subject has a Batten disease), the method provided herein comprises administering a recombinant vector described herein (i.e., a recombinant viral vector or a DNA expression construct) to the human subject via both a central nervous system (CNS) delivery route and an ocular delivery route (for example, an ocular delivery route described herein). In certain embodiments, the ocular delivery route is selected from one of the following: (1) subretinal administration without vitrectomy (for example, administration to subretinal space via the suprachoroidal space or via peripheral injection), (2) suprachoroidal administration, (3) administration to the outer space of the sclera (i.e., juxtascleral administration); (4) subretinal administration accompanied by vitrectomy; (5) intravitreal administration, and (6) intravitreal administration. In certain embodiments, the CNS delivery route is selected from one of the following: intracerebroventricular (ICV) delivery, intracisternal (IC) delivery, or intrathecal-lumbar (IT-L) delivery.

[0825] Effects of the methods provided herein on visual deficits may be measured by BCVA (Best-Corrected Visual Acuity), intraocular pressure, slit lamp biomicroscopy, and/or indirect ophthalmoscopy.

[0826] In specific embodiments, effects of the methods provided herein on visual deficits may be measured by whether the human patient's eye that is treated by a method described herein achieves BCVA of greater than 43 letters post-treatment (e.g., 46-50 weeks or 98-102 weeks post-treatment). A BCVA of 43 letters corresponds to 20/160 approximate Snellen equivalent. In a specific embodiment, the human patient's eye that is treated by a method described herein achieves BCVA of greater than 43 letters post-treatment (e.g., 46-50 weeks or 98-102 weeks post-treatment).

[0827] In specific embodiments, effects of the methods provided herein on visual deficits may be measured by whether the human patient's eye that is treated by a method described herein achieves BCVA of greater than 84 letters post-treatment (e.g., 46-50 weeks or 98-102 weeks post-treatment). A BCVA of 84 letters corresponds to 20/20 approximate Snellen equivalent. In a specific embodiment, the human patient's eye that is treated by a method described herein achieves BCVA of greater than 84 letters post-treatment (e.g., 46-50 weeks or 98-102 weeks post-treatment).

[0828] Effects of the methods provided herein on physical changes to eye/retina may be measured by SD-OCT (SD-Optical Coherence Tomography).

[0829] Efficacy may be monitored as measured by electroretinography (ERG).

[0830] Effects of the methods provided herein may be monitored by measuring signs of vision loss, infection, inflammation and other safety events, including retinal detachment.

[0831] Retinal thickness may be monitored to determine efficacy of the methods provided herein. Without being bound by any particular theory, thickness of the retina may be used as a clinical readout, wherein the greater reduction in retinal thickness or the longer period of time before thickening of the retina, the more efficacious the treatment. Retinal function may be determined, for example, by ERG. ERG is a non-invasive electrophysiologic test of retinal function, approved by the FDA for use in humans, which examines the light sensitive cells of the eye (the rods and cones), and their connecting ganglion cells, in particular, their response to a flash stimulation. Retinal thickness may be determined, for example, by SD-OCT. SD-OCT is a three-dimensional imaging technology which uses low-coherence interferometry to determine the echo time delay and magnitude of backscattered light reflected off an object of interest. OCT can be used to scan the layers of a tissue sample (e.g., the retina) with 3 to 15 μm axial resolution, and SD-OCT improves axial resolution and scan speed over previous forms of the technology (Schuman, 2008, Trans. Am. Opthamol. Soc. 106:426-458).

[0832] Effects of the methods provided herein may also be measured by a change from baseline in National Eye Institute Visual Functioning Questionnaire, the Rasch-scored version (NEI-VFQ-28-R) (composite score; activity limitation domain score; and socio-emotional functioning domain score). Effects of the methods provided herein may also be measured by a change from baseline in National Eye Institute Visual Functioning Questionnaire 25-item version (NEI-VFQ-25) (composite score and mental health subscale score). Effects of the methods provided herein may also be measured by a change from baseline in Macular Disease Treatment Satisfaction Questionnaire (MacTSQ) (composite score; safety, efficacy, and discomfort domain score; and information provision and convenience domain score).

[0833] In specific embodiments, the efficacy of a method described herein is reflected by an improvement in vision at about 4 weeks, 12 weeks, 6 months, 12 months, 24 months, 36 months, or at other desired timepoints. In a specific embodiment, the improvement in vision is characterized by an increase in BCVA, for example, an increase by 1 letter, 2 letters, 3 letters, 4 letters, 5 letters, 6 letters, 7 letters, 8 letters, 9 letters, 10 letters, 11 letters, or 12 letters, or more. In a specific embodiment, the improvement in vision is characterized by a 5%, 10%, 15%, 20%, 30%, 40%, 50% or more increase in visual acuity from baseline.

[0834] In specific embodiments, the efficacy of a method described herein is reflected by an reduction in central retinal thickness (CRT) at about 4 weeks, 12 weeks, 6 months, 12 months, 24 months, 36 months, or at other desired timepoint, for example, a 5%, 10%, 15%, 20%, 30%, 40%, 50% or more decrease in central retinal thickness from baseline.

[0835] In s specific embodiments, there is no inflammation in the eye after treatment or little inflammation in the eye after treatment (for example, an increase in the level of inflammation by 10%, 5%, 2%, 1% or less from baseline).

[0836] Effects of the methods provided herein on visual deficits may be measured by OptoKinetic Nystagmus (OKN).

[0837] Without being bound by theory, this visual acuity screening uses the principles of the OKN involuntary reflex to objectively assess whether a patient's eyes can follow a moving target. By using OKN, no verbal communication is needed between the tester and the patient. As such, OKN can be used to measure visual acuity in pre-verbal and/or non-verbal patients. In certain embodiments, OKN is used to measure visual acuity in patients that are 1 month old, 2 months old, 3 months old, 4 months old, 5 months old, 6 months old, 7 months old, 8 months old, 9 months old, 10 months old, 11 months old, 1 year old, 1.5 years old, 2 years old, 2.5 years old, 3 years old, 3.5 years old, 4 years old, 4.5 years old, or 5 years old. In certain embodiments, an iPad is used to measure visual acuity through detection of the OKN reflex when a patient is looking at movement on the iPad.

[0838] Without being bound by theory, this visual acuity screening uses the principles of the OKN involuntary reflex to objectively assess whether a patient's eyes can follow a moving target. By using OKN, no verbal communication is needed between the tester and the patient. As such, OKN can be used to measure visual acuity in pre-verbal and/or non-verbal patients. In certain embodiments, OKN is used to measure visual acuity in patients that are less than 1.5 months old, 2 months old, 3 months old, 4 months old, 5 months old, 6 months old, 7 months old, 8 months old, 9 months old, 10 months old, 11 months old, 1 year old, 1.5 years old, 2 years old, 2.5 years old, 3 years old, 3.5 years old, 4 years old, 4.5 years old, or 5 years old. In another specific embodiment, OKN is used to measure visual acuity in patients that are 1-2 months old, 2-3 months old, 3-4 months old, 4-5 months old, 5-6 months old, 6-7 months old, 7-8 months old, 8-9 months old, 9-10 months old, 10-11 months old, 11 months to 1 year old, 1-1.5 years old, 1.5-2 years old, 2-2.5 years old, 2.5-3 years old, 3-3.5 years old, 3.5-4 years old, 4-4.5 years old, or 4.5-5 years old. In another specific embodiment, OKN is used to measure visual acuity in patients that are 6 months to 5 years old. In certain embodiments, an iPad is used to measure visual acuity through detection of the OKN reflex when a patient is looking at movement on the iPad.

[0839] In certain embodiments, visual acuity is assessed in a patient presenting with Batten-CLN2-associated vision loss by measuring OKN before the patient has been treated with an AAV, preferably AAV8 or AAV9, encoding Tripeptidyl-Peptidase 1(TPP1). Specifically, the patient presenting with Batten-CLN2-associated vision loss is at the age, and/or within the age range described above. In certain embodiments, visual acuity assessed in a patient up to 5 years old presenting with Batten-CLN2-associated vision loss by measuring OKN after the patient has been treated with an AAV, preferably AAV8 or AAV9, encoding Tripeptidyl-Peptidase 1. In certain embodiments, a visual acuity assessment based on OKN determines that visual acuity does not decrease after treatment with AAV gene therapy. In certain embodiments, a visual acuity assessment based on OKN determines that visual acuity improves in a patient after treatment with AAV gene therapy by 5%, 10%, 15%, 20%, 25%, 30%, 35%, 40% 45%, 50%, 55%, 60%, 65%, 70%, 75%, 80%, 85%, 90%, 95% or 100%. In certain embodiments, a visual acuity assessment based on OKN determines that visual acuity does not further deteriorate in a patient after treatment with AAV gene therapy.

[0840] In certain embodiments, visual acuity is assessed in a patient presenting with Batten-CLN2-associated vision loss by measuring OKN before the patient has been treated with an AAV, preferably AAV8 or AAV9, encoding TPP1. Specifically, the patient presenting with Batten-CLN2-associated vision loss is at the age, and/or within the age range described above. In certain embodiments, visual acuity is assessed in a patient up to 5 years old presenting with Batten-CLN2-associated vision loss by measuring OKN after the patient has been treated with an AAV, preferably AAV8 or AAV9, encoding Tripeptidyl-Peptidase 1. In certain embodiments, a visual acuity assessment based on OKN determines that visual acuity does not decrease after treatment with AAV gene therapy. In certain embodiments, a visual acuity assessment based on OKN determines that visual acuity improves in a patient after treatment with AAV gene therapy by at least 5%, 10%, 15%, 20%, 25%, 30%, 35%, 40% 45%, 50%, 55%, 60%, 65%, 70%, 75%, 80%, 85%, 90%, 95% or at least 100%. In certain embodiments, a visual acuity assessment based on OKN determines that visual acuity does not further deteriorate in a patient after treatment with AAV gene therapy.

[0841] In certain embodiments, visual acuity is assessed in a patient presenting with Batten-CLN1-associated vision loss by measuring OKN before the patient has been treated with an AAV, preferably AAV8 or AAV9, encoding Palmitoyl-Protein Thioesterase 1 (PPT1). Specifically, the patient up to 5 years old presenting with Batten-CLN1-associated vision loss is at the age, and/or within the age range described above. In certain embodiments, visual acuity is assessed in a patient presenting with Batten-CLN1-associated vision loss by measuring OKN after the patient has been treated with an AAV, preferably AAV8 or AAV9, encoding PPT1. In certain embodiments, a visual acuity assessment based on OKN determines that visual acuity does not decrease after treatment with AAV gene therapy. In certain embodiments, a visual acuity assessment based on OKN determines that visual acuity improves in a patient after treatment with AAV gene therapy by 5%, 10%, 15%, 20%, 25%, 30%, 35%, 40% 45%, 50%, 55%, 60%, 65%, 70%, 75%, 80%, 85%, 90%, 95% or 100%. In certain embodiments, a visual acuity assessment based on OKN determines that visual acuity does not further deteriorate in a patient after treatment with AAV gene therapy.

[0842] In certain embodiments, visual acuity is assessed in a patient presenting with Batten-CLN1-associated vision loss by measuring OKN before the patient has been treated with an AAV, preferably AAV8 or AAV9, encoding PPT1. Specifically, the patient presenting with Batten-CLN1-associated vision loss is at the age, and/or within the age range described above. In certain embodiments, visual acuity is assessed in a patient up to 5 years old presenting with Batten-CLN1-associated vision loss by measuring OKN after the patient has been treated with an AAV, preferably AAV8 or AAV9, encoding PPT1. In certain embodiments, a visual acuity assessment based on OKN determines that visual acuity does not decrease after treatment with AAV gene therapy. In certain embodiments, a visual acuity assessment based on OKN determines that visual acuity improves in a patient after treatment with AAV gene therapy by at least 5%, 10%, 15%, 20%, 25%, 30%, 35%, 40% 45%, 50%, 55%, 60%, 65%, 70%, 75%, 80%, 85%, 90%, 95% or at least 100%. In certain embodiments, a visual acuity assessment based on OKN determines that visual acuity does not further deteriorate in a patient after treatment with AAV gene therapy.

[0843] In certain embodiments, visual acuity is assessed in a patient presenting with Batten-CLN3-associated vision loss by measuring OKN before the patient has been treated with an AAV, preferably AAV8 or AAV9, encoding Battenin (CLN3). Specifically, the patient presenting with Batten-CLN3-associated vision loss is at the age, and/or within the age range described above. In certain embodiments, visual acuity is assessed in a patient up to 5 years old presenting with Batten-CLN3-associated vision loss by measuring OKN after the patient has been treated with an AAV, preferably AAV8 or AAV9, encoding Battenin (CLN3). In certain embodiments, a visual acuity assessment based on OKN determines that visual acuity does not decrease after treatment with AAV gene therapy. In certain embodiments, a visual acuity assessment based on OKN determines that visual acuity improves in a patient after treatment with AAV gene therapy by 5%, 10%, 15%, 20%, 25%, 30%, 35%, 40% 45%, 50%, 55%, 60%, 65%, 70%, 75%, 80%, 85%, 90%, 95% or 100%. In certain embodiments, a visual acuity assessment based on OKN determines that visual acuity does not further deteriorate in a patient after treatment with AAV gene therapy.

[0844] In certain embodiments, visual acuity is assessed in a patient presenting with Batten-CLN3-associated vision loss by measuring OKN before the patient has been treated with an AAV, preferably AAV8 or AAV9, encoding Battenin (CLN3). Specifically, the patient presenting with Batten-CLN3-associated vision loss is at the age, and/or within the age range described above. In certain embodiments, visual acuity is assessed in a patient up to 5 years old presenting with Batten-CLN3-associated vision loss by measuring OKN after the patient has been treated with an AAV, preferably AAV8 or AAV9, encoding Battenin (CLN3). In certain embodiments, a visual acuity assessment based on OKN determines that visual acuity does not decrease after treatment with AAV gene therapy. In certain embodiments, a visual acuity assessment based on OKN determines that visual acuity improves in a patient after treatment with AAV gene therapy by at least 5%, 10%, 15%, 20%, 25%, 30%, 35%, 40% 45%, 50%, 55%, 60%, 65%, 70%, 75%, 80%, 85%, 90%, 95% or at least 100%. In certain embodiments, a visual acuity assessment based on OKN determines that visual acuity does not further deteriorate in a patient after treatment with AAV gene therapy.

[0845] In certain embodiments, visual acuity is assessed in a patient presenting with Batten-CLN6-associated vision loss by measuring OKN before the patient has been treated with an AAV, preferably AAV8 or AAV9, encoding CLN6 Transmembrane ER Protein (CLN6). Specifically, the patient up to 5 years old presenting with Batten-CLN6-associated vision loss is at the age, and/or within the age range described above. In certain embodiments, visual acuity is assessed in a patient presenting with Batten-CLN6-associated vision loss by measuring OKN after the patient has been treated with an AAV, preferably AAV8 or AAV9, encoding CLN6 Transmembrane ER Protein (CLN6). In certain embodiments, a visual acuity assessment based on OKN determines that visual acuity does not decrease after treatment with AAV gene therapy. In certain embodiments, a visual acuity assessment based on OKN determines that visual acuity improves in a patient after treatment with AAV gene therapy by 5%, 10%, 15%, 20%, 25%, 30%, 35%, 40% 45%, 50%, 55%, 60%, 65%, 70%, 75%, 80%, 85%, 90%, 95% or 100%. In certain embodiments, a visual acuity assessment based on OKN determines that visual acuity does not further deteriorate in a patient after treatment with AAV gene therapy.

[0846] In certain embodiments, visual acuity is assessed in a patient presenting with Batten-CLN6-associated vision loss by measuring OKN before the patient has been treated with an AAV, preferably AAV8 or AAV9, encoding CLN6 Transmembrane ER Protein (CLN6). Specifically, the patient up to 5 years old presenting with Batten-CLN6-associated vision loss is at the age, and/or within the age range described above. In certain embodiments, visual acuity is assessed in a patient presenting with Batten-CLN6-associated vision loss by measuring OKN after the patient has been treated with an AAV, preferably AAV8 or AAV9, encoding CLN6 Transmembrane ER Protein (CLN6). In certain embodiments, a visual acuity assessment based on OKN determines that visual acuity does not decrease after treatment with AAV gene therapy. In certain embodiments, a visual acuity assessment based on OKN determines that visual acuity improves in a patient after treatment with AAV gene therapy by at least 5%, 10%, 15%, 20%, 25%, 30%, 35%, 40% 45%, 50%, 55%, 60%, 65%, 70%, 75%, 80%, 85%, 90%, 95% or at least 100%. In certain embodiments, a visual acuity assessment based on OKN determines that visual acuity does not further deteriorate in a patient after treatment with AAV gene therapy.

[0847] In certain embodiments, visual acuity is assessed in a patient presenting with Batten-CLN7-associated vision loss by measuring OKN before the patient has been treated with an AAV, preferably AAV8 or AAV9, encoding Major Facilitator Superfamily Domain Containing 8 (MFSD8). Specifically, the patient up to 5 years old presenting with Batten-CLN7-associated vision loss is at the age, and/or within the age range described above. In certain embodiments, visual acuity is assessed in a patient presenting with Batten-CLN7-associated vision loss by measuring OKN after the patient has been treated with an AAV, preferably AAV8 or AAV9, encoding MFSD8. In certain embodiments, a visual acuity assessment based on OKN determines that visual acuity does not decrease after treatment with AAV gene therapy. In certain embodiments, a visual acuity assessment based on OKN determines that visual acuity improves in a patient after treatment with AAV gene therapy by 5%, 10%, 15%, 20%, 25%, 30%, 35%, 40% 45%, 50%, 55%, 60%, 65%, 70%, 75%, 80%, 85%, 90%, 95% or 100%. In certain embodiments, a visual acuity assessment based on OKN determines that visual acuity does not further deteriorate in a patient after treatment with AAV gene therapy.

[0848] In certain embodiments, visual acuity is assessed in a patient presenting with Batten-CLN7-associated vision loss by measuring OKN before the patient has been treated with an AAV, preferably AAV8 or AAV9, encoding MFSD8. Specifically, the patient presenting with Batten-CLN7-associated vision loss is at the age, and/or within the age range described above. In certain embodiments, visual acuity is assessed in a patient up to 5 years old presenting with Batten-CLN7-associated vision loss by measuring OKN after the patient has been treated with an AAV, preferably AAV8 or AAV9, encoding MFSD8. In certain embodiments, a visual acuity assessment based on OKN determines that visual acuity does not decrease after treatment with AAV gene therapy. In certain embodiments, a visual acuity assessment based on OKN determines that visual acuity improves in a patient after treatment with AAV gene therapy by at least 5%, 10%, 15%, 20%, 25%, 30%, 35%, 40% 45%, 50%, 55%, 60%, 65%, 70%, 75%, 80%, 85%, 90%, 95% or at least 100%. In certain embodiments, a visual acuity assessment based on OKN determines that visual acuity does not further deteriorate in a patient after treatment with AAV gene therapy.

[0849] If the human patient is a child, visual function can be assessed using an optokinetic nystagmus (OKN)-based approach or a modified OKN-based approach.

[0850] 6.2 Treatment System, Device, or Apparatus to be Used for a Treatment Method Described Herein

[0851] Also provided herein are treatment system, devices, and apparatuses to be used for a treatment method described herein, which may comprise one or more of the following: bottles, tubes, light source, microinjector, and foot pedal. In certain embodiments, the light source is a self-illuminating contact lens, which can be used to deposit vector in the back of the eye and in particular and to avoid damaging the optic disc, fovea and/or macula (see, e.g., Chalam et al., 2004, Ophthalmic surgery and lasers. 35. 76-77, which is incorporated by reference herein in its entirety). In certain embodiments, a self-illuminating contact lens is utilized during peripheral injection for visualizing the subretinal injection (see, e.g., Chalam et al., 2004, Ophthalmic surgery and lasers. 35. 76-77, which is incorporated by reference herein in its entirety). In certain embodiments, an optic fiber chandelier is utilized via a second trocar for visualizing the subretinal injection.

[0852] 6.3 Delivery of Anti-VEGF Antibody or Antigen-Binding Fragment

[0853] In certain embodiments, the therapeutic product is a fully human post-translationally modified (HuPTM) antibody against VEGF. In a specific embodiment, the pathology of the eye is associated with an ocular disease caused by increased neovascularization, for example, nAMD (also known as “wet” AMD), dry AMD, retinal vein occlusion (RVO), diabetic macular edema (DME), or diabetic retinopathy (DR) (in particular, wet AMD). The embodiments/aspects described in other sections of this disclosure are incorporated herein in this section to the extent they are applicable to the delivery of anti-VEGF antibodies or antigen-binding fragments. Described below are certain additional embodiments applicable to the delivery of anti-VEGF antibodies or antigen-binding fragments.

[0854] In a preferred embodiment, the fully human post-translationally modified antibody against VEGF is a fully human post-translationally modified antigen-binding fragment of a monoclonal antibody (mAb) against VEGF (“HuPTMFabVEGFi”). In a further preferred embodiment, the HuPTMFabVEGFi is a fully human glycosylated antigen-binding fragment of an anti-VEGF mAb (“HuGlyFabVEGFi”). See, also, International Patent Application Publication No. WO/2017/180936 (International Patent Application No. PCT/US2017/027529, filed Apr. 14, 2017), and International Patent Application Publication No. WO/2017/181021 (International Patent Application No. PCT/US2017/027650, filed Apr. 14, 2017), each of which is incorporated by reference herein in its entirety, for compositions and methods that can be used according to the invention described herein. In an alternative embodiment, full-length mAbs can be used.

[0855] Subjects to whom such gene therapy is administered should be those responsive to anti-VEGF therapy. In particular embodiments, the methods encompass treating patients who have been diagnosed with wet AMD, dry AMD, retinal vein occlusion (RVO), diabetic macular edema (DME), or diabetic retinopathy (DR) (in particular, wet AMD) and identified as responsive to treatment with an anti-VEGF antibody. In more specific embodiments, the patients are responsive to treatment with an anti-VEGF antigen-binding fragment. In certain embodiments, the patients have been shown to be responsive to treatment with an anti-VEGF antigen-binding fragment injected intravitreally prior to treatment with gene therapy. In specific embodiments, the patients have previously been treated with LUCENTIS® (ranibizumab), EYLEA® (aflibercept), and/or AVASTIN® (bevacizumab), and have been found to be responsive to one or more of said LUCENTIS (ranibizumab), EYLEA® (aflibercept), and/or AVASTIN® (bevacizumab).

[0856] Subjects to whom such recombinant viral vector or other DNA expression construct is delivered should be responsive to the anti-VEGF antigen-binding fragment encoded by the transgene in the recombinant viral vector or expression construct. To determine responsiveness, the anti-hVEGF antigen-binding fragment transgene product (e.g., produced in cell culture, bioreactors, etc.) may be administered directly to the subject, such as by intravitreal injection.

[0857] The HuPTMFabVEGFi, e.g., HuGlyFabVEGFi, encoded by the transgene can include, but is not limited to an antigen-binding fragment of an antibody that binds to hVEGF, such as bevacizumab; an anti-hVEGF Fab moiety such as ranibizumab; or such bevacizumab or ranibizumab Fab moieties engineered to contain additional glycosylation sites on the Fab domain (e.g., see Courtois et al., 2016, mAbs 8: 99-112 which is incorporated by reference herein in its entirety for it description of derivatives of bevacizumab that are hyperglycosylated on the Fab domain of the full length antibody).

[0858] The recombinant vector used for delivering the transgene should have a tropism for human retinal cells or photoreceptor cells. Such vectors can include non-replicating recombinant adeno-associated virus vectors (“rAAV”), particularly those bearing an AAV8 capsid are preferred. However, other recombinant viral vectors may be used, including but not limited to recombinant lentiviral vectors, vaccinia viral vectors, or non-viral expression vectors referred to as “naked DNA” constructs. Preferably, the HuPTMFabVEGFi, e.g., HuGlyFabVEGFi, transgene should be controlled by appropriate expression control elements, for example, the CB7 promoter (a chicken β-actin promoter and CMV enhancer), the RPE65 promoter, or opsin promoter to name a few, and can include other expression control elements that enhance expression of the transgene driven by the vector (e.g., introns such as the chicken β-actin intron, minute virus of mice (MVM) intron, human factor IX intron (e.g., FIX truncated intron 1), β-globin splice donor/immunoglobulin heavy chain spice acceptor intron, adenovirus splice donor/immunoglobulin splice acceptor intron, SV40 late splice donor/splice acceptor (19S/16S) intron, and hybrid adenovirus splice donor/IgG splice acceptor intron and polyA signals such as the rabbit β-globin polyA signal, human growth hormone (hGH) polyA signal, SV40 late polyA signal, synthetic polyA (SPA) signal, and bovine growth hormone (bGH) polyA signal). See, e.g., Powell and Rivera-Soto, 2015, Discov. Med., 19(102):49-57.

[0859] In preferred embodiments, gene therapy constructs are designed such that both the heavy and light chains are expressed. More specifically, the heavy and light chains should be expressed at about equal amounts, in other words, the heavy and light chains are expressed at approximately a 1:1 ratio of heavy chains to light chains. The coding sequences for the heavy and light chains can be engineered in a single construct in which the heavy and light chains are separated by a cleavable linker or IRES so that separate heavy and light chain polypeptides are expressed. See, e.g., Section 6.1.2 for specific leader sequences and specific IRES, 2A, and other linker sequences that can be used with the methods and compositions provided herein.

[0860] Without being bound by theory, in certain embodiments, the methods and compositions provided herein for the delivery of anti-VEGF antibodies or antigen-binding fragments are based, in part, on the following principles:
[0861] (i) Human retinal cells are secretory cells that possess the cellular machinery for post-translational processing of secreted proteins—including glycosylation and tyrosine-O-sulfation, a robust process in retinal cells. (See, e.g., Wang et al., 2013, Analytical Biochem. 427: 20-28 and Adamis et al., 1993, BBRC 193: 631-638 reporting the production of glycoproteins by retinal cells; and Kanan et al., 2009, Exp. Eye Res. 89: 559-567 and Kanan & Al-Ubaidi, 2015, Exp. Eye Res. 133: 126-131 reporting the production of tyrosine-sulfated glycoproteins secreted by retinal cells, each of which is incorporated by reference in its entirety for post-translational modifications made by human retinal cells).
[0862] (ii) Contrary to the state of the art understanding, anti-VEGF antigen-binding fragments, such as ranibizumab (and the Fab domain of full length anti-VEGF mAbs such as bevacizumab) do indeed possess N-linked glycosylation sites. For example, see FIG. 1 which identifies non-consensus asparaginal (“N”) glycosylation sites in the C_{H} domain (TVSWN¹⁶⁵SGAL) and in the C_{L} domain (QSGN¹⁵⁸SQE), as well as glutamine (“Q”) residues that are glycosylation sites in the VH domain (Q¹¹⁵GT) and V_{L} domain (TFQ¹⁰⁰GT) of ranibizumab (and corresponding sites in the Fab of bevacizumab). (See, e.g., Valliere-Douglass et al., 2009, J. Biol. Chem. 284: 32493-32506, and Valliere-Douglass et al., 2010, J. Biol. Chem. 285: 16012-16022, each of which is incorporated by reference in its entirety for the identification of N-linked glycosylation sites in antibodies).
[0863] (iii) While such non-canonical sites usually result in low level glycosylation (e.g., about 1-5%) of the antibody population, the functional benefits may be significant in immunoprivileged organs, such as the eye (See, e.g., van de Bovenkamp et al., 2016, J. Immunol. 196:1435-1441). For example, Fab glycosylation may affect the stability, half-life, and binding characteristics of an antibody. To determine the effects of Fab glycosylation on the affinity of the antibody for its target, any technique known to one of skill in the art may be used, for example, enzyme linked immunosorbent assay (ELISA), or surface plasmon resonance (SPR). To determine the effects of Fab glycosylation on the half-life of the antibody, any technique known to one of skill in the art may be used, for example, by measurement of the levels of radioactivity in the blood or organs (e.g., the eye) in a subject to whom a radiolabelled antibody has been administered. To determine the effects of Fab glycosylation on the stability, for example, levels of aggregation or protein unfolding, of the antibody, any technique known to one of skill in the art may be used, for example, differential scanning calorimetry (DSC), high performance liquid chromatography (HPLC), e.g., size exclusion high performance liquid chromatography (SEC-HPLC), capillary electrophoresis, mass spectrometry, or turbidity measurement. Provided herein, the HuPTMFabVEGFi, e.g., HuGlyFabVEGFi, transgene results in production of a Fab which is 0.5%, 1%, 2%, 3%, 4%, 5%, 6%, 7%, 8%, 9%, or 10% or more glycosylated at non-canonical sites. In certain embodiments, 0.5%, 1%, 2%, 3%, 4%, 5%, 6%, 7%, 8%, 9%, or 10% or more Fabs from a population of Fabs are glycosylated at non-canonical sites. In certain embodiments, 0.5%, 1%, 2%, 3%, 4%, 5%, 6%, 7%, 8%, 9%, or 10% or more non-canonical sites are glycosylated. In certain embodiments, the glycosylation of the Fab at these non-canonical sites is 25%, 50%, 100%, 200%, 300%, 400%, 500%, or more greater than the amount of glycosylation of these non-canonical sites in a Fab produced in HEK293 cells.
[0864] (iv) In addition to the glycosylation sites, anti-VEGF Fabs such as ranibizumab (and the Fab of bevacizumab) contain tyrosine (“Y”) sulfation sites in or near the CDRs; see FIG. 1 which identifies tyrosine-O-sulfation sites in the VH (EDTAVY⁹⁴Y⁹⁵) and V_{L} (EDFATY⁸⁶) domains of ranibizumab (and corresponding sites in the Fab of bevacizumab). (See, e.g., Yang et al., 2015, Molecules 20:2138-2164, esp. at p. 2154 which is incorporated by reference in its entirety for the analysis of amino acids surrounding tyrosine residues subjected to protein tyrosine sulfation. The “rules” can be summarized as follows: Y residues with E or D within +5 to −5 position of Y, and where position −1 of Y is a neutral or acidic charged amino acid—but not a basic amino acid, e.g., R, K, or H that abolishes sulfation). Human IgG antibodies can manifest a number of other post-translational modifications, such as N-terminal modifications, C-terminal modifications, degradation or oxidation of amino acid residues, cysteine related variants, and glycation (See, e.g., Liu et al., 2014, mAbs 6(5):1145-1154).
[0865] (v) Glycosylation of anti-VEGF Fabs, such as ranibizumab or the Fab fragment of bevacizumab by human retinal cells will result in the addition of glycans that can improve stability, half-life and reduce unwanted aggregation and/or immunogenicity of the transgene product. (See, e.g., Bovenkamp et al., 2016, J. Immunol. 196: 1435-1441 for a review of the emerging importance of Fab glycosylation). Significantly, glycans that can be added to HuPTMFabVEGFi, e.g., HuGlyFabVEGFi, provided herein, are highly processed complex-type biantennary N-glycans that contain 2,6-sialic acid (e.g., see FIG. 2 depicting the glycans that may be incorporated into HuPTMFabVEGFi, e.g., HuGlyFabVEGFi) and bisecting GlcNAc, but not NGNA (N-Glycolylneuraminic acid, Neu5Gc). Such glycans are not present in ranibizumab (which is made in E. coli and is not glycosylated at all) or in bevacizumab (which is made in CHO cells that do not have the 2,6-sialyltransferase required to make this post-translational modification, nor do CHO cells product bisecting GlcNAc, although they do add Neu5Gc (NGNA) as sialic acid not typical (and potentially immunogenic) to humans instead of Neu5Ac (NANA)). See, e.g., Dumont et al., 2015, Crit. Rev. Biotechnol. (Early Online, published online Sep. 18, 2015, pp. 1-13 at p. 5). Moreover, CHO cells can also produce an immunogenic glycan, the α-Gal antigen, which reacts with anti-α-Gal antibodies present in most individuals, and at high concentrations can trigger anaphylaxis. See, e.g., Bosques, 2010, Nat Biotech 28: 1153-1156. The human glycosylation pattern of the HuPTMFabVEGFi, e.g., HuGlyFabVEGFi, provided herein, should reduce immunogenicity of the transgene product and improve efficacy.
[0866] (vi) Tyrosine-sulfation of anti-VEGF Fabs, such as ranibizumab or the Fab fragment of bevacizumab—a robust post-translational process in human retinal cells—could result in transgene products with increased avidity for VEGF. Indeed, tyrosine-sulfation of the Fab of therapeutic antibodies against other targets has been shown to dramatically increase avidity for antigen and activity. (See, e.g., Loos et al., 2015, PNAS 112: 12675-12680, and Choe et al., 2003, Cell 114: 161-170). Such post-translational modifications are not present on ranibizumab (which is made in E. coli a host that does not possess the enzymes required for tyrosine-sulfation), and at best is under-represented in bevacizumab—a CHO cell product. Unlike human retinal cells, CHO cells are not secretory cells and have a limited capacity for post-translational tyrosine-sulfation. (See, e.g., Mikkelsen & Ezban, 1991, Biochemistry 30: 1533-1537, esp. discussion at p. 1537).

[0867] For the foregoing reasons, the production of HuPTMFabVEGFi, e.g., HuGlyFabVEGFi, should result in a “biobetter” molecule for the treatment of wet AMD, dry AMD, retinal vein occlusion (RVO), diabetic macular edema (DME), or diabetic retinopathy (DR) (in particular, wet AMD) accomplished via gene therapy—e.g., by administering a recombinant viral vector or a recombinant DNA expression construct encoding HuPTMFabVEGFi, e.g., HuGlyFabVEGFi, to the suprachoroidal space, subretinal space, or outer surface of the sclera in the eye(s) of patients (human subjects) diagnosed with wet AMD, dry AMD, retinal vein occlusion (RVO), diabetic macular edema (DME), or diabetic retinopathy (DR) (in particular, wet AMD), to create a permanent depot in the eye that continuously supplies the fully-human post-translationally modified, e.g., human-glycosylated, sulfated transgene product produced by transduced retinal cells. The cDNA construct for the FabVEGFi should include a signal peptide that ensures proper co- and post-translational processing (glycosylation and protein sulfation) by the transduced retinal cells. Such signal sequences used by retinal cells may include but are not limited to:

MNFLLSWVHW SLALLLYLHH AKWSQA (VEGF-A signal
peptide)
MERAAPSRRV PLPLLLLGGL ALLAAGVDA (Fibulin-1 signal
peptide)
MAPLRPLLIL ALLAWVALA (Vitronectin signal peptide)
MRLLAKIICLMLWAICVA (Complement Factor H signal
peptide)
MRLLAFLSLL ALVLQETGT (Opticin signal peptide)
MKWVTFISLLFLFSSAYS (Albumin signal peptide)
MAFLWLLSCWALLGTTFG (Chymotrypsinogen signal
peptide)
MYRMQLLSCIALILALVTNS (Interleukin-2 signal
peptide)
MNLLLILTFVAAAVA (Trypsinogen-2 signal peptide).
See, e.g., Stern et al., 2007, Trends Cell. Mol.
Biol., 2: 1-17 and Dalton & Barton, 2014, Protein
Sci, 23: 517-525, each of which is incorporated by
reference herein in its entirety for the signal
peptides that can be used.

[0868] As an alternative, or an additional treatment to gene therapy, the HuPTMFabVEGFi product, e.g., HuGlyFabVEGFi glycoprotein, can be produced in human cell lines by recombinant DNA technology, and administered to patients diagnosed with wet AMD, dry AMD, retinal vein occlusion (RVO), diabetic macular edema (DME), or diabetic retinopathy (DR) (in particular, wet AMD) by intravitreal injection. The HuPTMFabVEGFi product, e.g., glycoprotein, may also be administered to patients with wet AMD, dry AMD, retinal vein occlusion (RVO), diabetic macular edema (DME), or diabetic retinopathy (DR) (in particular, wet AMD). Human cell lines that can be used for such recombinant glycoprotein production include but are not limited to human embryonic kidney 293 cells (HEK293), fibrosarcoma HT-1080, HKB-11, CAP, HuH-7, and retinal cell lines, PER.C6, or RPE to name a few (e.g., see Dumont et al., 2015, Crit. Rev. Biotechnol. (Early Online, published online Sep. 18, 2015, pp. 1-13) “Human cell lines for biopharmaceutical manufacturing: history, status, and future perspectives” which is incorporated by reference in its entirety for a review of the human cell lines that could be used for the recombinant production of the HuPTMFabVEGFi product, e.g., HuGlyFabVEGFi glycoprotein). To ensure complete glycosylation, especially sialylation, and tyrosine-sulfation, the cell line used for production can be enhanced by engineering the host cells to co-express α-2,6-sialyltransferase (or both α-2,3- and α-2,6-sialyltransferases) and/or TPST-1 and TPST-2 enzymes responsible for tyrosine-O-sulfation in retinal cells.

[0869] Combinations of delivery of the HuPTMFabVEGFi, e.g., HuGlyFabVEGFi, to the eye/retina accompanied by delivery of other available treatments are encompassed by the methods provided herein. The additional treatments may be administered before, concurrently or subsequent to the gene therapy treatment. Available treatments for wet AMD, dry AMD, retinal vein occlusion (RVO), diabetic macular edema (DME), or diabetic retinopathy (DR) (in particular, wet AMD) that could be combined with the gene therapy provided herein include but are not limited to laser photocoagulation, photodynamic therapy with verteporfin, and intravitreal (IVT) injections with anti-VEGF agents, including but not limited to pegaptanib, ranibizumab, aflibercept, or bevacizumab. Additional treatments with anti-VEGF agents, such as biologics, may be referred to as “rescue” therapy.

[0870] 6.3.1 N-Glycosylation, Tyrosine Sulfation, and O-Glycosylation

[0871] The amino acid sequence (primary sequence) of the anti-VEGF antigen-binding fragment of a HuPTMFabVEGFi, e.g., HuGlyFabVEGFi, used in the methods described herein comprises at least one site at which N-glycosylation or tyrosine sulfation takes place. In certain embodiments, the amino acid sequence of the anti-VEGF antigen-binding fragment comprises at least one N-glycosylation site and at least one tyrosine sulfation site. Such sites are described in detail below. In certain embodiments, the amino acid sequence of the anti-VEGF antigen-binding fragment comprises at least one O-glycosylation site, which can be in addition to one or more N-glycosylation sites and/or tyrosine sulfation sites present in said amino acid sequence.

### (a) N-Glycosylation

[0872] Reverse Glycosylation Sites

[0873] The canonical N-glycosylation sequence is known in the art to be Asn-X-Ser (or Thr), wherein X can be any amino acid except Pro. However, it recently has been demonstrated that asparagine (Asn) residues of human antibodies can be glycosylated in the context of a reverse consensus motif, Ser(or Thr)-X-Asn, wherein X can be any amino acid except Pro. See Valliere-Douglass et al., 2009, J. Biol. Chem. 284:32493-32506; and Valliere-Douglass et al., 2010, J. Biol. Chem. 285:16012-16022. As disclosed herein, and contrary to the state of the art understanding, anti-VEGF antigen-binding fragments for use in accordance with the methods described herein, e.g., ranibizumab, comprise several of such reverse consensus sequences. Accordingly, the methods described herein comprise use of anti-VEGF antigen-binding fragments that comprise at least one N-glycosylation site comprising the sequence Ser(or Thr)-X-Asn, wherein X can be any amino acid except Pro (also referred to herein as a “reverse N-glycosylation site”).

[0874] In certain embodiments, the methods described herein comprise use of an anti-VEGF antigen-binding fragment that comprises one, two, three, four, five, six, seven, eight, nine, ten, or more than ten N-glycosylation sites comprising the sequence Ser(or Thr)-X-Asn, wherein X can be any amino acid except Pro. In certain embodiments, the methods described herein comprise use of an anti-VEGF antigen-binding fragment that comprises one, two, three, four, five, six, seven, eight, nine, ten, or more than ten reverse N-glycosylation sites, as well as one, two, three, four, five, six, seven, eight, nine, ten, or more than ten non-consensus N-glycosylation sites (as defined herein, below).

[0875] In a specific embodiment, the anti-VEGF antigen-binding fragment comprising one or more reverse N-glycosylation sites used in the methods described herein is ranibizumab, comprising a light chain and a heavy chain of SEQ ID NOs. 1 and 2, respectively. In another specific embodiment, the anti-VEGF antigen-binding fragment comprising one or more reverse N-glycosylation sites used in the methods comprises the Fab of bevacizumab, comprising a light chain and a heavy chain of SEQ ID NOs. 3 and 4, respectively.

[0876] Non-Consensus Glycosylation Sites

[0877] In addition to reverse N-glycosylation sites, it recently has been demonstrated that glutamine (Gln) residues of human antibodies can be glycosylated in the context of a non-consensus motif, Gln-Gly-Thr. See Valliere-Douglass et al., 2010, J. Biol. Chem. 285:16012-16022. Surprisingly, anti-VEGF antigen-binding fragments for use in accordance with the methods described herein, e.g., ranibizumab, comprise several of such non-consensus sequences. Accordingly, the methods described herein comprise use of anti-VEGF antigen-binding fragments that comprise at least one N-glycosylation site comprising the sequence Gln-Gly-Thr (also referred to herein as a “non-consensus N-glycosylation site”).

[0878] In certain embodiments, the methods described herein comprise use of an anti-VEGF antigen-binding fragment that comprises one, two, three, four, five, six, seven, eight, nine, ten, or more than ten N-glycosylation sites comprising the sequence Gln-Gly-Thr.

[0879] In a specific embodiment, the anti-VEGF antigen-binding fragment comprising one or more non-consensus N-glycosylation sites used in the methods described herein is ranibizumab (comprising a light chain and a heavy chain of SEQ ID NOs. 1 and 2, respectively). In another specific embodiment, the anti-VEGF antigen-binding fragment comprising one or more non-consensus N-glycosylation sites used in the methods comprises the Fab of bevacizumab (comprising a light chain and a heavy chain of SEQ ID NOs. 3 and 4, respectively).

[0880] Engineered N-Glycosylation Sites

[0881] In certain embodiments, a nucleic acid encoding an anti-VEGF antigen-binding fragment is modified to include 1, 2, 3, 4, 5, 6, 7, 8, 9, 10, or more N-glycosylation sites (including the canonical N-glycosylation consensus sequence, reverse N-glycosylation site, and non-consensus N-glycosylation sites) than would normally be associated with the HuGlyFabVEGFi (e.g., relative to the number of N-glycosylation sites associated with the anti-VEGF antigen-binding fragment in its unmodified state). In specific embodiments, introduction of glycosylation sites is accomplished by insertion of N-glycosylation sites (including the canonical N-glycosylation consensus sequence, reverse N-glycosylation site, and non-consensus N-glycosylation sites) anywhere in the primary structure of the antigen-binding fragment, so long as said introduction does not impact binding of the antigen-binding fragment to its antigen, VEGF. Introduction of glycosylation sites can be accomplished by, e.g., adding new amino acids to the primary structure of the antigen-binding fragment, or the antibody from which the antigen-binding fragment is derived (i.e., the glycosylation sites are added, in full or in part), or by mutating existing amino acids in the antigen-binding fragment, or the antibody from which the antigen-binding fragment is derived, in order to generate the N-glycosylation sites (i.e., amino acids are not added to the antigen-binding fragment/antibody, but selected amino acids of the antigen-binding fragment/antibody are mutated so as to form N-glycosylation sites). Those of skill in the art will recognize that the amino acid sequence of a protein can be readily modified using approaches known in the art, e.g., recombinant approaches that include modification of the nucleic acid sequence encoding the protein.

[0882] In a specific embodiment, an anti-VEGF antigen-binding fragment used in the method described herein is modified such that, when expressed in retinal cells, it can be hyperglycosylated. See Courtois et al., 2016, mAbs 8:99-112 which is incorporated by reference herein in its entirety. In a specific embodiment, said anti-VEGF antigen-binding fragment is ranibizumab (comprising a light chain and a heavy chain of SEQ ID NOs. 1 and 2, respectively). In another specific embodiment, said anti-VEGF antigen-binding fragment comprises the Fab of bevacizumab (comprising a light chain and a heavy chain of SEQ ID NOs. 3 and 4, respectively).

[0883] N-Glycosylation of Anti-VEGF Antigen-Binding Fragments

[0884] Unlike small molecule drugs, biologics usually comprise a mixture of many variants with different modifications or forms that have a different potency, pharmacokinetics, and safety profile. It is not essential that every molecule produced either in the gene therapy or protein therapy approach be fully glycosylated and sulfated. Rather, the population of glycoproteins produced should have sufficient glycosylation (including 2,6-sialylation) and sulfation to demonstrate efficacy. The goal of gene therapy treatment provided herein is to slow or arrest the progression of retinal degeneration, and to slow or prevent loss of vision with minimal intervention/invasive procedures.

[0885] In a specific embodiment, an anti-VEGF antigen-binding fragment, e.g., ranibizumab, used in accordance with the methods described herein, when expressed in a retinal cell, could be glycosylated at 100% of its N-glycosylation sites. However, one of skill in the art will appreciate that not every N-glycosylation site of an anti-VEGF antigen-binding fragment need be N-glycosylated in order for benefits of glycosylation to be attained. Rather, benefits of glycosylation can be realized when only a percentage of N-glycosylation sites are glycosylated, and/or when only a percentage of expressed antigen-binding fragments are glycosylated. Accordingly, in certain embodiments, an anti-VEGF antigen-binding fragment used in accordance with the methods described herein, when expressed in a retinal cell, is glycosylated at 10%-20%, 20%-30%, 30%-40%, 40%-50%, 50%-60%, 60%-70%, 70%-80%, 80%-90%, or 90%-100% of it available N-glycosylation sites. In certain embodiments, when expressed in a retinal cell, 10%-20%, 20%-30%, 30%-40%, 40%-50%, 50%-60%, 60%-70%, 70%-80%, 80%-90%, or 90%-100% of the an anti-VEGF antigen-binding fragments used in accordance with the methods described herein are glycosylated at least one of their available N-glycosylation sites.

[0886] In a specific embodiment, at least 10%, 20%, 30%, 40%, 50%, 60%, 70%, 75%, 80%, 85%, 90%, 95%, or 99% of the N-glycosylation sites present in an anti-VEGF antigen-binding fragment used in accordance with the methods described herein are glycosylated at an Asn residue (or other relevant residue) present in an N-glycosylation site, when the anti-VEGF antigen-binding fragment is expressed in a retinal cell. That is, at least 50%, 60%, 70%, 75%, 80%, 85%, 90%, 95%, or 99% of the N-glycosylation sites of the resultant HuGlyFabVEGFi are glycosylated.

[0887] In another specific embodiment, at least 10%, 20%, 30%, 40%, 50%, 60%, 70%, 75%, 80%, 85%, 90%, 95%, or 99% of the N-glycosylation sites present in an anti-VEGF antigen-binding fragment used in accordance with the methods described herein are glycosylated with an identical attached glycan linked to the Asn residue (or other relevant residue) present in an N-glycosylation site, when the anti-VEGF antigen-binding fragment is expressed in a retinal cell. That is, at least 50%, 60%, 70%, 75%, 80%, 85%, 90%, 95%, or 99% of the N-glycosylation sites of the resultant HuGlyFabVEGFi an identical attached glycan.

[0888] When an anti-VEGF antigen-binding fragment, e.g., ranibizumab, used in accordance with the methods described herein is expressed in a retinal cell, the N-glycosylation sites of the of the antigen-binding fragment can be glycosylated with various different glycans. N-glycans of antigen-binding fragments have been characterized in the art. For example, Bondt et al., 2014, Mol. & Cell. Proteomics 13.11:3029-3039 (incorporated by reference herein in its entirety for it disclosure of Fab-associated N-glycans) characterizes glycans associated with Fabs, and demonstrates that Fab and Fc portions of antibodies comprise distinct glycosylation patterns, with Fab glycans being high in galactosylation, sialylation, and bisection (e.g., with bisecting GlcNAc) but low in fucosylation with respect to Fc glycans. Like Bondt, Huang et al., 2006, Anal. Biochem. 349:197-207 (incorporated by reference herein in its entirety for it disclosure of Fab-associated N-glycans) found that most glycans of Fabs are sialylated. However, in the Fab of the antibody examined by Huang (which was produced in a murine cell background), the identified sialic residues were N-Glycolylneuraminic acid (“Neu5Gc” or “NeuGc”) (which is not natural to humans) instead of N-acetylneuraminic acid (“Neu5Ac,” the predominant human sialic acid). In addition, Song et al., 2014, Anal. Chem. 86:5661-5666 (incorporated by reference herein in its entirety for it disclosure of Fab-associated N-glycans) describes a library of N-glycans associated with commercially available antibodies.

[0889] Importantly, when the anti-VEGF antigen-binding fragments, e.g., ranibizumab, used in accordance with the methods described herein are expressed in human retinal cells, the need for in vitro production in prokaryotic host cells (e.g., E. coli) or eukaryotic host cells (e.g., CHO cells) is circumvented. Instead, as a result of the methods described herein (e.g., use of retinal cells to express anti-hVEGF antigen-binding fragments), N-glycosylation sites of the anti-VEGF antigen-binding fragments are advantageously decorated with glycans relevant to and beneficial to treatment of humans. Such an advantage is unattainable when CHO cells or E. coli are utilized in antibody/antigen-binding fragment production, because e.g., CHO cells (1) do not express 2,6 sialyltransferase and thus cannot add 2,6 sialic acid during N-glycosylation and (2) can add Neu5Gc as sialic acid instead of Neu5Ac; and because E. coli does not naturally contain components needed for N-glycosylation. Accordingly, in one embodiment, an anti-VEGF antigen-binding fragment expressed in a retinal cell to give rise to a HuGlyFabVEGFi used in the methods of treatment described herein is glycosylated in the manner in which a protein is N-glycosylated in human retinal cells, e.g., retinal pigment cells, but is not glycosylated in the manner in which proteins are glycosylated in CHO cells. In another embodiment, an anti-VEGF antigen-binding fragment expressed in a retinal cell to give rise to a HuGlyFabVEGFi used in the methods of treatment described herein is glycosylated in the manner in which a protein is N-glycosylated in human retinal cells, e.g., retinal pigment cells, wherein such glycosylation is not naturally possible using a prokaryotic host cell, e.g., using E. coli.

[0890] In certain embodiments, a HuGlyFabVEGFi, e.g., ranibizumab, used in accordance with the methods described herein comprises one, two, three, four, five or more distinct N-glycans associated with Fabs of human antibodies. In a specific embodiment, said N-glycans associated with Fabs of human antibodies are those described in Bondt et al., 2014, Mol. & Cell. Proteomics 13.11:3029-3039, Huang et al., 2006, Anal. Biochem. 349:197-207, and/or Song et al., 2014, Anal. Chem. 86:5661-5666. In certain embodiments, a HuGlyFabVEGFi, e.g., ranibizumab, used in accordance with the methods described herein does not comprise detectable NeuGc and/or α-Gal antigen.

[0891] In a specific embodiment, the HuGlyFabVEGFi, e.g., ranibizumab, used in accordance with the methods described herein are predominantly glycosylated with a glycan comprising 2,6-linked sialic acid. In certain embodiments, HuGlyFabVEGFi comprising 2,6-linked sialic acid is polysialylated, i.e., contains more than one sialic acid. In certain embodiments, each N-glycosylation site of said HuGlyFabVEGFi comprises a glycan comprising 2,6-linked sialic acid, i.e., 100% of the N-glycosylation site of said HuGlyFabVEGFi comprise a glycan comprising 2,6-linked sialic acid. In another specific embodiment, at least 20%, 30%, 40%, 50%, 60%, 70%, 75%, 80%, 85%, 90%, 95%, or 99% of the N-glycosylation sites of a HuGlyFabVEGFi used in accordance with the methods described herein are glycosylated with a glycan comprising 2,6-linked sialic acid. In another specific embodiment, at least 10%-20%, 20%-30%, 30%-40%, 40%-50%, 50%-60%, 60%-70%, 70%-80%, 80% 90%, or 90%-99% of the N-glycosylation sites of a HuGlyFabVEGFi used in accordance with the methods described herein are glycosylated with a glycan comprising 2,6-linked sialic acid. In another specific embodiment, at least 20%, 30%, 40%, 50%, 60%, 70%, 75%, 80%, 85%, 90%, 95%, or 99% of the antigen-binding fragments expressed in a retinal cell in accordance with methods described herein (i.e., the antigen-binding fragments that give rise to HuGlyFabVEGFi, e.g., ranibizumab) are glycosylated with a glycan comprising 2,6-linked sialic acid. In another specific embodiment, at least 10%-20%, 20%-30%, 30%-40%, 40%-50%, 50%-60%, 60%-70%, 70%-80%, 80%-90%, or 90%-99% of the antigen-binding fragments expressed in a retinal cell in accordance with methods described herein (i.e., the Fabs that give rise to HuGlyFabVEGFi, e.g., ranibizumab) are glycosylated with a glycan comprising 2,6-linked sialic acid. In another specific embodiment, said sialic acid is Neu5Ac. In accordance with such embodiments, when only a percentage of the N-glycosylation sites of a HuGlyFabVEGFi are 2,6 sialylated or polysialylated, the remaining N-glycosylation can comprise a distinct N-glycan, or no N-glycan at all (i.e., remain non-glycosylated).

[0892] When a HuGlyFabVEGFi is 2,6 polysialylated, it comprises multiple sialic acid residues, e.g., 2, 3, 4, 5, 6, 7, 8, 9, 10 or more than 10 sialic acid residues. In certain embodiments, when a HuGlyFabVEGFi is polysialylated, it comprises 2-5, 5-10, 10-20, 20-30, 30-40, or 40-50 sialic acid residues. In certain embodiments, when a HuGlyFabVEGFi is polysialylated, it comprises 2,6-linked (sialic acid)ⁿ, wherein n can be any number from 1-100.

[0893] In a specific embodiment, the HuGlyFabVEGFi, e.g., ranibizumab, used in accordance with the methods described herein are predominantly glycosylated with a glycan comprising a bisecting GlcNAc. In certain embodiments, each N-glycosylation site of said HuGlyFabVEGFi comprises a glycan comprising a bisecting GlcNAc, i.e., 100% of the N-glycosylation site of said HuGlyFabVEGFi comprise a glycan comprising a bisecting GlcNAc. In another specific embodiment, at least 20%, 30%, 40%, 50%, 60%, 70%, 75%, 80%, 85%, 90%, 95%, or 99% of the N-glycosylation sites of a HuGlyFabVEGFi used in accordance with the methods described herein are glycosylated with a glycan comprising a bisecting GlcNAc. In another specific embodiment, at least 10%-20%, 20%-30%, 30%-40%, 40%-50%, 50%-60%, 60%-70%, 70%-80%, 80%-90%, or 90%-99% of the N-glycosylation sites of a HuGlyFabVEGFi used in accordance with the methods described herein are glycosylated with a glycan comprising a bisecting GlcNAc. In another specific embodiment, at least 20%, 30%, 40%, 50%, 60%, 70%, 75%, 80%, 85%, 90%, 95%, or 99% of the antigen-binding fragments expressed in a retinal cell in accordance with methods described herein (i.e., the antigen-binding fragments that give rise to HuGlyFabVEGFi, e.g., ranibizumab) are glycosylated with a glycan comprising a bisecting GlcNAc. In another specific embodiment, at least 10%-20%, 20%-30%, 30%-40%, 40%-50%, 50%-60%, 60%-70%, 70%-80%, 80%-90%, or 90%-99% of the antigen-binding fragments expressed in a retinal cell in accordance with methods described herein (i.e., the antigen-binding fragments that give rise to HuGlyFabVEGFi, e.g., ranibizumab) are glycosylated with a glycan comprising a bisecting GlcNAc.

[0894] In certain embodiments, the HuGlyFabVEGFi, e.g., ranibizumab, used in accordance with the methods described herein are hyperglycosylated, i.e., in addition to the N-glycosylation resultant from the naturally occurring N-glycosylation sites, said HuGlyFabVEGFi comprise glycans at N-glycosylation sites engineered to be present in the amino acid sequence of the antigen-binding fragment giving rise to HuGlyFabVEGFi. In certain embodiments, the HuGlyFabVEGFi, e.g., ranibizumab, used in accordance with the methods described herein is hyperglycosylated but does not comprise detectable NeuGc and/or α-Gal antigen.

[0895] Assays for determining the glycosylation pattern of antibodies, including antigen-binding fragments are known in the art. For example, hydrazinolysis can be used to analyze glycans. First, polysaccharides are released from their associated protein by incubation with hydrazine (the Ludger Liberate Hydrazinolysis Glycan Release Kit, Oxfordshire, UK can be used). The nucleophile hydrazine attacks the glycosidic bond between the polysaccharide and the carrier protein and allows release of the attached glycans. N-acetyl groups are lost during this treatment and have to be reconstituted by re-N-acetylation. Glycans may also be released using enzymes such as glycosidases or endoglycosidases, such as PNGase F and Endo H, which cleave cleanly and with fewer side reactions than hydrazines. The free glycans can be purified on carbon columns and subsequently labeled at the reducing end with the fluorophor 2-amino benzamide. The labeled polysaccharides can be separated on a GlycoSep-N column (GL Sciences) according to the HPLC protocol of Royle et al, Anal Biochem 2002, 304(1):70-90. The resulting fluorescence chromatogram indicates the polysaccharide length and number of repeating units. Structural information can be gathered by collecting individual peaks and subsequently performing MS/MS analysis. Thereby the monosaccharide composition and sequence of the repeating unit can be confirmed and additionally in homogeneity of the polysaccharide composition can be identified. Specific peaks of low or high molecular weight can be analyzed by MALDI-MS/MS and the result used to confirm the glycan sequence. Each peak in the chromatogram corresponds to a polymer, e.g., glycan, consisting of a certain number of repeat units and fragments, e.g., sugar residues, thereof. The chromatogram thus allows measurement of the polymer, e.g., glycan, length distribution. The elution time is an indication for polymer length, while fluorescence intensity correlates with molar abundance for the respective polymer, e.g., glycan. Other methods for assessing glycans associated with antigen-binding fragments include those described by Bondt et al., 2014, Mol. & Cell. Proteomics 13.11:3029-3039, Huang et al., 2006, Anal. Biochem. 349:197-207, and/or Song et al., 2014, Anal. Chem. 86:5661-5666.

[0896] Homogeneity or heterogeneity of the glycan patterns associated with antibodies (including antigen-binding fragments), as it relates to both glycan length or size and numbers glycans present across glycosylation sites, can be assessed using methods known in the art, e.g., methods that measure glycan length or size and hydrodynamic radius. HPLC, such as Size exclusion, normal phase, reversed phase, and anion exchange HPLC, as well as capillary electrophoresis, allows the measurement of the hydrodynamic radius. Higher numbers of glycosylation sites in a protein lead to higher variation in hydrodynamic radius compared to a carrier with less glycosylation sites. However, when single glycan chains are analyzed, they may be more homogenous due to the more controlled length. Glycan length can be measured by hydrazinolysis, SDS PAGE, and capillary gel electrophoresis. In addition, homogeneity can also mean that certain glycosylation site usage patterns change to a broader/narrower range. These factors can be measured by Glycopeptide LC-MS/MS.

[0897] Benefits of N-Glycosylation

[0898] N-glycosylation confers numerous benefits on the HuGlyFabVEGFi used in the methods described herein. Such benefits are unattainable by production of antigen-binding fragments in E. coli, because E. coli does not naturally possess components needed for N-glycosylation. Further, some benefits are unattainable through antibody production in, e.g., CHO cells, because CHO cells lack components needed for addition of certain glycans (e.g., 2,6 sialic acid and bisecting GlcNAc) and because CHO cells can add glycans, e.g., Neu5Gc not typical to humans. See, e.g., Song et al., 2014, Anal. Chem. 86:5661-5666. Accordingly, by virtue of the discovery set forth herein that anti-VEGF antigen-binding fragments, e.g., ranibizumab, comprise non-canonical N-glycosylation sites (including both reverse and non-consensus glycosylation sites), a method of expressing such anti-VEGF antigen-binding fragments in a manner that results in their glycosylation (and thus improved benefits associated with the antigen-binding fragments) has been realized. In particular, expression of anti-VEGF antigen-binding fragments in human retinal cells results in the production of HuGlyFabVEGFi (e.g., ranibizumab) comprising beneficial glycans that otherwise would not be associated with the antigen-binding fragments or their parent antibody.

[0899] While non-canonical glycosylation sites usually result in low level glycosylation (e.g., 1-5%) of the antibody population, the functional benefits may be significant in immunoprivileged organs, such as the eye (See, e.g., van de Bovenkamp et al., 2016, J. Immunol. 196:1435-1441). For example, Fab glycosylation may affect the stability, half-life, and binding characteristics of an antibody. To determine the effects of Fab glycosylation on the affinity of the antibody for its target, any technique known to one of skill in the art may be used, for example, enzyme linked immunosorbent assay (ELISA), or surface plasmon resonance (SPR). To determine the effects of Fab glycosylation on the half-life of the antibody, any technique known to one of skill in the art may be used, for example, by measurement of the levels of radioactivity in the blood or organs (e.g., the eye) in a subject to whom a radiolabeled antibody has been administered. To determine the effects of Fab glycosylation on the stability, for example, levels of aggregation or protein unfolding, of the antibody, any technique known to one of skill in the art may be used, for example, differential scanning calorimetry (DSC), high performance liquid chromatography (HPLC), e.g., size exclusion high performance liquid chromatography (SEC-HPLC), capillary electrophoresis, mass spectrometry, or turbidity measurement. Provided herein, the HuGlyFabVEGFi transgene results in production of an antigen-binding fragment which is 0.5%, 1%, 2%, 3%, 4%, 5%, 6%, 7%, 8%, 9%, or 10% or more glycosylated at non-canonical sites. In certain embodiments, 0.5%, 1%, 2%, 3%, 4%, 5%, 6%, 7%, 8%, 9%, or 10% or more antigen-binding fragments from a population of antigen-binding fragments are glycosylated at non-canonical sites. In certain embodiments, 0.5%, 1%, 2%, 3%, 4%, 5%, 6%, 7%, 8%, 9%, or 10% or more non-canonical sites are glycosylated. In certain embodiments, the glycosylation of the antigen-binding fragment at these non-canonical sites is 25%, 50%, 100%, 200%, 300%, 400%, 500%, or more greater than the amount of glycosylation of these non-canonical sites in an antigen-binding fragment produced in HEK293 cells.

[0900] The presence of sialic acid on HuGlyFabVEGFi used in the methods described herein can impact clearance rate of the HuGlyFabVEGFi, e.g., the rate of clearance from the vitreous humour. Accordingly, sialic acid patterns of a HuGlyFabVEGFi can be used to generate a therapeutic having an optimized clearance rate. Method of assessing antigen-binding fragment clearance rate are known in the art. See, e.g., Huang et al., 2006, Anal. Biochem. 349:197-207.

[0901] In another specific embodiment, a benefit conferred by N-glycosylation is reduced aggregation. Occupied N-glycosylation sites can mask aggregation prone amino acid residues, resulting in decreased aggregation. Such N-glycosylation sites can be native to an antigen-binding fragment used herein, or engineered into an antigen-binding fragment used herein, resulting in HuGlyFabVEGFi that is less prone to aggregation when expressed, e.g., expressed in retinal cells. Methods of assessing aggregation of antibodies are known in the art. See, e.g., Courtois et al., 2016, mAbs 8:99-112 which is incorporated by reference herein in its entirety.

[0902] In another specific embodiment, a benefit conferred by N-glycosylation is reduced immunogenicity. Such N-glycosylation sites can be native to an antigen-binding fragment used herein, or engineered into an antigen-binding fragment used herein, resulting in HuGlyFabVEGFi that is less prone to immunogenicity when expressed, e.g., expressed in retinal cells.

[0903] In another specific embodiment, a benefit conferred by N-glycosylation is protein stability. N-glycosylation of proteins is well-known to confer stability on them, and methods of assessing protein stability resulting from N-glycosylation are known in the art. See, e.g., Sola and Griebenow, 2009, J Pharm Sci., 98(4): 1223-1245.

[0904] In another specific embodiment, a benefit conferred by N-glycosylation is altered binding affinity. It is known in the art that the presence of N-glycosylation sites in the variable domains of an antibody can increase the affinity of the antibody for its antigen. See, e.g., Bovenkamp et al., 2016, J. Immunol. 196:1435-1441. Assays for measuring antibody binding affinity are known in the art. See, e.g., Wright et al., 1991, EMBO J. 10:2717-2723; and Leibiger et al., 1999, Biochem. J. 338:529-538.

### (b) Tyrosine Sulfation

[0905] Tyrosine sulfation occurs at tyrosine (Y) residues with glutamate (E) or aspartate (D) within +5 to −5 position of Y, and where position −1 of Y is a neutral or acidic charged amino acid, but not a basic amino acid, e.g., arginine (R), lysine (K), or histidine (H) that abolishes sulfation. Surprisingly, anti-VEGF antigen-binding fragments for use in accordance with the methods described herein, e.g., ranibizumab, comprise tyrosine sulfation sites (see FIG. 1). Accordingly, the methods described herein comprise use of anti-VEGF antigen-binding fragments, e.g., HuPTMFabVEGFi, that comprise at least one tyrosine sulfation site, such the anti-VEGF antigen-binding fragments, when expressed in retinal cells, can be tyrosine sulfated.

[0906] Importantly, tyrosine-sulfated antigen-binding fragments, e.g., ranibizumab, cannot be produced in E. coli, which naturally does not possess the enzymes required for tyrosine-sulfation. Further, CHO cells are deficient for tyrosine sulfation—they are not secretory cells and have a limited capacity for post-translational tyrosine-sulfation. See, e.g., Mikkelsen & Ezban, 1991, Biochemistry 30: 1533-1537. Advantageously, the methods provided herein call for expression of anti-VEGF antigen-binding fragments, e.g., HuPTMFabVEGFi, for example, ranibizumab, in retinal cells, which are secretory and do have capacity for tyrosine sulfation. See Kanan et al., 2009, Exp. Eye Res. 89: 559-567 and Kanan & Al-Ubaidi, 2015, Exp. Eye Res. 133: 126-131 reporting the production of tyrosine-sulfated glycoproteins secreted by retinal cells.

[0907] Tyrosine sulfation is advantageous for several reasons. For example, tyrosine-sulfation of the antigen-binding fragment of therapeutic antibodies against targets has been shown to dramatically increase avidity for antigen and activity. See, e.g., Loos et al., 2015, PNAS 112: 12675-12680, and Choe et al., 2003, Cell 114: 161-170. Assays for detection tyrosine sulfation are known in the art. See, e.g., Yang et al., 2015, Molecules 20:2138-2164.

### (c) O-Glycosylation

[0908] O-glycosylation comprises the addition of N-acetyl-galactosamine to serine or threonine residues by the enzyme. It has been demonstrated that amino acid residues present in the hinge region of antibodies can be 0-glycosylated. In certain embodiments, the anti-VEGF antigen-binding fragments, e.g., ranibizumab, used in accordance with the methods described herein comprise all or a portion of their hinge region, and thus are capable of being 0-glycosylated when expressed in human retinal cells. The possibility of O-glycosylation confers another advantage to the HuPTMFabVEGFi, e.g., HuGlyFabVEGFi, provided herein, as compared to, e.g., antigen-binding fragments produced in E. coli, again because the E. coli naturally does not contain machinery equivalent to that used in human O-glycosylation. (Instead, O-glycosylation in E. coli has been demonstrated only when the bacteria is modified to contain specific O-glycosylation machinery. See, e.g., Faridmoayer et al., 2007, J. Bacteriol. 189:8088-8098) O-glycosylated HuPTMFabVEGFi, e.g., HuGlyFabVEGFi, by virtue of possessing glycans, shares advantageous characteristics with N-glycosylated HuGlyFabVEGFi (as discussed above).

[0909] 6.3.2 Constructs and Formulations

[0910] In some aspects, the disclosure provides for a nucleic acid for use, wherein the nucleic acid encodes a HuPTMFabVEGFi, e.g., HuGlyFabVEGFi operatively linked to a promoter selected from the group consisting of: cytomegalovirus (CMV) promoter, Rous sarcoma virus (RSV) promoter, MMT promoter, EF-1 alpha promoter, UB6 promoter, chicken beta-actin promoter, CAG promoter, RPE65 promoter and opsin promoter.

[0911] In a specific embodiment, the recombinant vectors described herein comprise the following components: (1) AAV2 inverted terminal repeats that flank the expression cassette; (2) Control elements, which include a) the CB7 promoter, comprising the CMV enhancer/chicken β-actin promoter, b) a chicken β-actin intron and c) a rabbit β-globin poly A signal; and (3) nucleic acid sequences coding for the heavy and light chains of anti-VEGF antigen-binding fragment, separated by a self-cleaving furin (F)/F2A linker, ensuring expression of equal amounts of the heavy and the light chain polypeptides.

[0912] The HuPTMFabVEGFi, e.g., HuGlyFabVEGFi encoded by the transgene can include, but is not limited to an antigen-binding fragment of an antibody that binds to VEGF, such as bevacizumab; an anti-VEGF Fab moiety such as ranibizumab; or such bevacizumab or ranibizumab Fab moieties engineered to contain additional glycosylation sites on the Fab domain (e.g., see Courtois et al., 2016, mAbs 8: 99-112 which is incorporated by reference herein in its entirety for it description of derivatives of bevacizumab that are hyperglycosylated on the Fab domain of the full length antibody).

[0913] In certain embodiments, the recombinant vectors provided herein encode an anti-VEGF antigen-binding fragment transgene. In specific embodiments, the anti-VEGF antigen-binding fragment transgene is controlled by appropriate expression control elements for expression in retinal cells: In certain embodiments, the anti-VEGF antigen-binding fragment transgene comprises bevacizumab Fab portion of the light and heavy chain cDNA sequences (SEQ ID NOs. 10 and 11, respectively). In certain embodiments, the anti-VEGF antigen-binding fragment transgene comprises ranibizumab light and heavy chain cDNA sequences (SEQ ID NOs. 12 and 13, respectively). In certain embodiments, the anti-VEGF antigen-binding fragment transgene encodes a bevacizumab Fab, comprising a light chain and a heavy chain of SEQ ID NOs: 3 and 4, respectively. In certain embodiments, the anti-VEGF antigen-binding fragment transgene encodes an antigen-binding fragment comprising a light chain comprising an amino acid sequence that is at least 85%, 86%, 87%, 88%, 89%, 90%, 91%, 92%, 93%, 94%, 95%, 96%, 97%, 98% or 99% identical to the sequence set forth in SEQ ID NO: 3. In certain embodiments, the anti-VEGF antigen-binding fragment transgene encodes an antigen-binding fragment comprising a heavy chain comprising an amino acid sequence that is at least 85%, 86%, 87%, 88%, 89%, 90%, 91%, 92%, 93%, 94%, 95%, 96%, 97%, 98% or 99% identical to the sequence set forth in SEQ ID NO: 4. In certain embodiments, the anti-VEGF antigen-binding fragment transgene encodes an antigen-binding fragment comprising a light chain comprising an amino acid sequence that is at least 85%, 86%, 87%, 88%, 89%, 90%, 91%, 92%, 93%, 94%, 95%, 96%, 97%, 98% or 99% identical to the sequence set forth in SEQ ID NO: 3 and a heavy chain comprising an amino acid sequence that is at least 85%, 86%, 87%, 88%, 89%, 90%, 91%, 92%, 93%, 94%, 95%, 96%, 97%, 98% or 99% identical to the sequence set forth in SEQ ID NO: 4. In certain embodiments, the anti-VEGF antigen-binding fragment transgene encodes a hyperglycosylated ranibizumab, comprising a light chain and a heavy chain of SEQ ID NOs: 1 and 2, respectively. In certain embodiments, the anti-VEGF antigen-binding fragment transgene encodes an antigen-binding fragment comprising a light chain comprising an amino acid sequence that is at least 85%, 86%, 87%, 88%, 89%, 90%, 91%, 92%, 93%, 94%, 95%, 96%, 97%, 98% or 99% identical to the sequence set forth in SEQ ID NO: 1. In certain embodiments, the anti-VEGF antigen-binding fragment transgene encodes an antigen-binding fragment comprising a heavy chain comprising an amino acid sequence that is at least 85%, 86%, 87%, 88%, 89%, 90%, 91%, 92%, 93%, 94%, 95%, 96%, 97%, 98% or 99% identical to the sequence set forth in SEQ ID NO: 2. In certain embodiments, the anti-VEGF antigen-binding fragment transgene encodes an antigen-binding fragment comprising a light chain comprising an amino acid sequence that is at least 85%, 86%, 87%, 88%, 89%, 90%, 91%, 92%, 93%, 94%, 95%, 96%, 97%, 98% or 99% identical to the sequence set forth in SEQ ID NO: 1 and a heavy chain comprising an amino acid sequence that is at least 85%, 86%, 87%, 88%, 89%, 90%, 91%, 92%, 93%, 94%, 95%, 96%, 97%, 98% or 99% identical to the sequence set forth in SEQ ID NO: 2.

[0914] In certain embodiments, the anti-VEGF antigen-binding fragment transgene encodes a hyperglycosylated bevacizumab Fab, comprising a light chain and a heavy chain of SEQ ID NOs: 3 and 4, with one or more of the following mutations: L118N (heavy chain), E195N (light chain), or Q160N or Q1605 (light chain). In certain embodiments, the anti-VEGF antigen-binding fragment transgene encodes a hyperglycosylated ranibizumab, comprising a light chain and a heavy chain of SEQ ID NOs: 1 and 2, with one or more of the following mutations: L118N (heavy chain), E195N (light chain), or Q160N or Q1605 (light chain). The sequences of the antigen-binding fragment transgene cDNAs may be found, for example, in Table 2. In certain embodiments, the sequence of the antigen-binding fragment transgene cDNAs is obtained by replacing the signal sequence of SEQ ID NOs: 10 and 11 or SEQ ID NOs: 12 and 13 with one or more signal sequences listed in Table 1.

[0915] In certain embodiments, the anti-VEGF antigen-binding fragment transgene encodes an antigen-binding fragment and comprises the nucleotide sequences of the six bevacizumab CDRs. In certain embodiments, the anti-VEGF antigen-binding fragment transgene encodes an antigen-binding fragment and comprises the nucleotide sequences of the six ranibizumab CDRs. In certain embodiments, the anti-VEGF antigen-binding fragment transgene encodes an antigen-binding fragment comprising a heavy chain variable region comprising heavy chain CDRs 1-3 of ranibizumab (SEQ ID NOs: 20, 18, and 21). In certain embodiments, the anti-VEGF antigen-binding fragment transgene encodes an antigen-binding fragment comprising a light chain variable region comprising light chain CDRs 1-3 of ranibizumab (SEQ ID NOs: 14-16). In certain embodiments, the anti-VEGF antigen-binding fragment transgene encodes an antigen-binding fragment comprising a heavy chain variable region comprising heavy chain CDRs 1-3 of bevacizumab (SEQ ID NOs: 17-19). In certain embodiments, the anti-VEGF antigen-binding fragment transgene encodes an antigen-binding fragment comprising a light chain variable region comprising light chain CDRs 1-3 of bevacizumab (SEQ ID NOs: 14-16). In certain embodiments, the anti-VEGF antigen-binding fragment transgene encodes an antigen-binding fragment comprising a heavy chain variable region comprising heavy chain CDRs 1-3 of ranibizumab (SEQ ID NOs: 20, 18, and 21) and a light chain variable region comprising light chain CDRs 1-3 of ranibizumab (SEQ ID NOs: 14-16). In certain embodiments, the anti-VEGF antigen-binding fragment transgene encodes an antigen-binding fragment comprising a heavy chain variable region comprising heavy chain CDRs 1-3 of bevacizumab (SEQ ID NOs: 17-19) and a light chain variable region comprising light chain CDRs 1-3 of bevacizumab (SEQ ID NOs: 14-16).

[0916] In certain embodiments, the anti-VEGF antigen-binding fragment transgene encodes an antigen-binding fragment comprising a light chain variable region comprising light chain CDRs 1-3 of SEQ ID NOs: 14-16, wherein the second amino acid residue of the light chain CDR3 (i.e., the second Q in QQYSTVPWTF (SEQ ID NO. 16)) does not carry one or more of the following chemical modifications: oxidation, acetylation, deamidation, and pyroglutamation (pyro Glu). In a specific embodiment, the anti-VEGF antigen-binding fragment transgene encodes an antigen-binding fragment comprising a light chain variable region comprising light chain CDRs 1-3 of SEQ ID NOs: 14-16, wherein the eighth and eleventh amino acid residues of the light chain CDR1 (i.e., the two Ns in SASQDISNYLN (SEQ ID NO. 14) each carries one or more of the following chemical modifications: oxidation, acetylation, deamidation, and pyroglutamation (pyro Glu), and the second amino acid residue of the light chain CDR3 (i.e., the second Q in QQYSTVPWTF (SEQ ID NO. 16)) does not carry one or more of the following chemical modifications: oxidation, acetylation, deamidation, and pyroglutamation (pyro Glu). In a specific embodiment, the anti-VEGF antigen-binding fragment transgene encodes an antigen-binding fragment comprising a light chain variable region comprising light chain CDRs 1-3 of SEQ ID NOs: 14-16, wherein the second amino acid residue of the light chain CDR3 (i.e., the second Q in QQYSTVPWTF (SEQ ID NO. 16)) is not acetylated. In a specific embodiment, the anti-VEGF antigen-binding fragment transgene encodes an antigen-binding fragment comprising a light chain variable region comprising light chain CDRs 1-3 of SEQ ID NOs: 14-16, wherein the eighth and eleventh amino acid residues of the light chain CDR1 (i.e., the two Ns in SASQDISNYLN (SEQ ID NO. 14) each carries one or more of the following chemical modifications: oxidation, acetylation, deamidation, and pyroglutamation (pyro Glu), and the second amino acid residue of the light chain CDR3 (i.e., the second Q in QQYSTVPWTF (SEQ ID NO. 16)) is not acetylated. In a preferred embodiment, the chemical modification(s) or lack of chemical modification(s) (as the case may be) described herein is determined by mass spectrometry.

[0917] In certain embodiments, the anti-VEGF antigen-binding fragment transgene encodes an antigen-binding fragment comprising a heavy chain variable region comprising heavy chain CDRs 1-3 of SEQ ID NOs: 20, 18, and 21, wherein the last amino acid residue of the heavy chain CDR1 (i.e., the N in GYDFTHYGMN (SEQ ID NO. 20)) does not carry one or more of the following chemical modifications: oxidation, acetylation, deamidation, and pyroglutamation (pyro Glu). In a specific embodiment, the anti-VEGF antigen-binding fragment transgene encodes an antigen-binding fragment comprising a heavy chain variable region comprising heavy chain CDRs 1-3 of SEQ ID NOs: 20, 18, and 21, wherein the ninth amino acid residue of the heavy chain CDR1 (i.e., the M in GYDFTHYGMN (SEQ ID NO. 20)) carries one or more of the following chemical modifications: acetylation, deamidation, and pyroglutamation (pyro Glu), the third amino acid residue of the heavy chain CDR2 (i.e., the N in WINTYTGEPTYAADFKR (SEQ ID NO. 18) carries one or more of the following chemical modifications: acetylation, deamidation, and pyroglutamation (pyro Glu), and the last amino acid residue of the heavy chain CDR1 (i.e., the N in GYDFTHYGMN (SEQ ID NO. 20)) does not carry one or more of the following chemical modifications: oxidation, acetylation, deamidation, and pyroglutamation (pyro Glu). In a specific embodiment, the anti-VEGF antigen-binding fragment transgene encodes an antigen-binding fragment comprising a heavy chain variable region comprising heavy chain CDRs 1-3 of SEQ ID NOs: 20, 18, and 21, wherein the last amino acid residue of the heavy chain CDR1 (i.e., the N in GYDFTHYGMN (SEQ ID NO. 20)) is not acetylated. In a specific embodiment, the anti-VEGF antigen-binding fragment transgene encodes an antigen-binding fragment comprising a heavy chain variable region comprising heavy chain CDRs 1-3 of SEQ ID NOs: 20, 18, and 21, wherein the ninth amino acid residue of the heavy chain CDR1 (i.e., the M in GYDFTHYGMN (SEQ ID NO. 20)) carries one or more of the following chemical modifications: acetylation, deamidation, and pyroglutamation (pyro Glu), the third amino acid residue of the heavy chain CDR2 (i.e., the N in WINTYTGEPTYAADFKR (SEQ ID NO. 18) carries one or more of the following chemical modifications: acetylation, deamidation, and pyroglutamation (pyro Glu), and the last amino acid residue of the heavy chain CDR1 (i.e., the N in GYDFTHYGMN (SEQ ID NO. 20)) is not acetylated. In a preferred embodiment, the chemical modification(s) or lack of chemical modification(s) (as the case may be) described herein is determined by mass spectrometry.

[0918] In certain embodiments, the anti-VEGF antigen-binding fragment transgene encodes an antigen-binding fragment comprising a light chain variable region comprising light chain CDRs 1-3 of SEQ ID NOs: 14-16 and a heavy chain variable region comprising heavy chain CDRs 1-3 of SEQ ID NOs: 20, 18, and 21, wherein the second amino acid residue of the light chain CDR3 (i.e., the second Q in QQYSTVPWTF (SEQ ID NO. 16)) does not carry one or more of the following chemical modifications: oxidation, acetylation, deamidation, and pyroglutamation (pyro Glu), and wherein the last amino acid residue of the heavy chain CDR1 (i.e., the N in GYDFTHYGMN (SEQ ID NO. 20)) does not carry one or more of the following chemical modifications: oxidation, acetylation, deamidation, and pyroglutamation (pyro Glu). In a specific embodiment, the anti-VEGF antigen-binding fragment transgene encodes an antigen-binding fragment comprising a light chain variable region comprising light chain CDRs 1-3 of SEQ ID NOs: 14-16 and a heavy chain variable region comprising heavy chain CDRs 1-3 of SEQ ID NOs: 20, 18, and 21, wherein: (1) the ninth amino acid residue of the heavy chain CDR1 (i.e., the M in GYDFTHYGMN (SEQ ID NO. 20)) carries one or more of the following chemical modifications: acetylation, deamidation, and pyroglutamation (pyro Glu), the third amino acid residue of the heavy chain CDR2 (i.e., the N in WINTYTGEPTYAADFKR (SEQ ID NO. 18) carries one or more of the following chemical modifications: acetylation, deamidation, and pyroglutamation (pyro Glu), and the last amino acid residue of the heavy chain CDR1 (i.e., the N in GYDFTHYGMN (SEQ ID NO. 20)) does not carry one or more of the following chemical modifications: oxidation, acetylation, deamidation, and pyroglutamation (pyro Glu); and (2) the eighth and eleventh amino acid residues of the light chain CDR1 (i.e., the two Ns in SASQDISNYLN (SEQ ID NO. 14) each carries one or more of the following chemical modifications: oxidation, acetylation, deamidation, and pyroglutamation (pyro Glu), and the second amino acid residue of the light chain CDR3 (i.e., the second Q in QQYSTVPWTF (SEQ ID NO. 16)) does not carry one or more of the following chemical modifications: oxidation, acetylation, deamidation, and pyroglutamation (pyro Glu). In a specific embodiment, the anti-VEGF antigen-binding fragment transgene encodes an antigen-binding fragment comprising a light chain variable region comprising light chain CDRs 1-3 of SEQ ID NOs: 14-16 and a heavy chain variable region comprising heavy chain CDRs 1-3 of SEQ ID NOs: 20, 18, and 21, wherein the second amino acid residue of the light chain CDR3 (i.e., the second Q in QQYSTVPWTF (SEQ ID NO. 16)) is not acetylated, and wherein the last amino acid residue of the heavy chain CDR1 (i.e., the N in GYDFTHYGMN (SEQ ID NO. 20)) is not acetylated. In a specific embodiment, the antigen-binding fragment comprises a heavy chain CDR1 of SEQ ID NO. 20, wherein: (1) the ninth amino acid residue of the heavy chain CDR1 (i.e., the M in GYDFTHYGMN (SEQ ID NO. 20)) carries one or more of the following chemical modifications: acetylation, deamidation, and pyroglutamation (pyro Glu), the third amino acid residue of the heavy chain CDR2 (i.e., the N in WINTYTGEPTYAADFKR (SEQ ID NO. 18) carries one or more of the following chemical modifications: acetylation, deamidation, and pyroglutamation (pyro Glu), and the last amino acid residue of the heavy chain CDR1 (i.e., the N in GYDFTHYGMN (SEQ ID NO. 20)) is not acetylated; and (2) the eighth and eleventh amino acid residues of the light chain CDR1 (i.e., the two Ns in SASQDISNYLN (SEQ ID NO. 14) each carries one or more of the following chemical modifications: oxidation, acetylation, deamidation, and pyroglutamation (pyro Glu), and the second amino acid residue of the light chain CDR3 (i.e., the second Q in QQYSTVPWTF (SEQ ID NO. 16)) is not acetylated. In a preferred embodiment, the chemical modification(s) or lack of chemical modification(s) (as the case may be) described herein is determined by mass spectrometry.

[0919] In certain aspects, also provided herein are anti-VEGF antigen-binding fragments comprising light chain CDRs 1-3 of SEQ ID NOs: 14-16 and heavy chain CDRs 1-3 of SEQ ID NOs: 20, 18, and 21, and transgenes encoding such antigen-VEGF antigen-binding fragments, wherein the second amino acid residue of the light chain CDR3 (i.e., the second Q in QQYSTVPWTF (SEQ ID NO. 16)) does not carry one or more of the following chemical modifications: oxidation, acetylation, deamidation, and pyroglutamation (pyro Glu). In a specific embodiment, the antigen-binding fragment comprises light chain CDRs 1-3 of SEQ ID NOs: 14-16 and heavy chain CDRs 1-3 of SEQ ID NOs: 20, 18, and 21, wherein the eighth and eleventh amino acid residues of the light chain CDR1 (i.e., the two Ns in SASQDISNYLN (SEQ ID NO. 14) each carries one or more of the following chemical modifications: oxidation, acetylation, deamidation, and pyroglutamation (pyro Glu), and the second amino acid residue of the light chain CDR3 (i.e., the second Q in QQYSTVPWTF (SEQ ID NO. 16)) does not carry one or more of the following chemical modifications: oxidation, acetylation, deamidation, and pyroglutamation (pyro Glu). In a specific embodiment, the antigen-binding fragment comprises light chain CDRs 1-3 of SEQ ID NOs: 14-16 and heavy chain CDRs 1-3 of SEQ ID NOs: 20, 18, and 21, wherein the second amino acid residue of the light chain CDR3 (i.e., the second Q in QQYSTVPWTF (SEQ ID NO. 16)) is not acetylated. In a specific embodiment, the antigen-binding fragment comprises light chain CDRs 1-3 of SEQ ID NOs: 14-16 and heavy chain CDRs 1-3 of SEQ ID NOs: 20, 18, and 21, wherein the eighth and eleventh amino acid residues of the light chain CDR1 (i.e., the two Ns in SASQDISNYLN (SEQ ID NO. 14) each carries one or more of the following chemical modifications: oxidation, acetylation, deamidation, and pyroglutamation (pyro Glu), and the second amino acid residue of the light chain CDR3 (i.e., the second Q in QQYSTVPWTF (SEQ ID NO. 16)) is not acetylated. The anti-VEGF antigen-binding fragments and transgenes provided herein can be used in any method according to the invention described herein. In a preferred embodiment, the chemical modification(s) or lack of chemical modification(s) (as the case may be) described herein is determined by mass spectrometry.

[0920] In certain aspects, also provided herein are anti-VEGF antigen-binding fragments comprising light chain CDRs 1-3 of SEQ ID NOs: 14-16 and heavy chain CDRs 1-3 of SEQ ID NOs: 20, 18, and 21, and transgenes encoding such antigen-VEGF antigen-binding fragments, wherein the last amino acid residue of the heavy chain CDR1 (i.e., the N in GYDFTHYGMN (SEQ ID NO. 20)) does not carry one or more of the following chemical modifications: oxidation, acetylation, deamidation, and pyroglutamation (pyro Glu). In a specific embodiment, the antigen-binding fragment comprises light chain CDRs 1-3 of SEQ ID NOs: 14-16 and heavy chain CDRs 1-3 of SEQ ID NOs: 20, 18, and 21, wherein the ninth amino acid residue of the heavy chain CDR1 (i.e., the M in GYDFTHYGMN (SEQ ID NO. 20)) carries one or more of the following chemical modifications: acetylation, deamidation, and pyroglutamation (pyro Glu), the third amino acid residue of the heavy chain CDR2 (i.e., the N in WINTYTGEPTYAADFKR (SEQ ID NO. 18) carries one or more of the following chemical modifications: acetylation, deamidation, and pyroglutamation (pyro Glu), and the last amino acid residue of the heavy chain CDR1 (i.e., the N in GYDFTHYGMN (SEQ ID NO. 20)) does not carry one or more of the following chemical modifications: oxidation, acetylation, deamidation, and pyroglutamation (pyro Glu). In a specific embodiment, the antigen-binding fragment comprises light chain CDRs 1-3 of SEQ ID NOs: 14-16 and heavy chain CDRs 1-3 of SEQ ID NOs: 20, 18, and 21, wherein the last amino acid residue of the heavy chain CDR1 (i.e., the N in GYDFTHYGMN (SEQ ID NO. 20)) is not acetylated. In a specific embodiment, the antigen-binding fragment comprises light chain CDRs 1-3 of SEQ ID NOs: 14-16 and heavy chain CDRs 1-3 of SEQ ID NOs: 20, 18, and 21, wherein the ninth amino acid residue of the heavy chain CDR1 (i.e., the M in GYDFTHYGMN (SEQ ID NO. 20)) carries one or more of the following chemical modifications: acetylation, deamidation, and pyroglutamation (pyro Glu), the third amino acid residue of the heavy chain CDR2 (i.e., the N in WINTYTGEPTYAADFKR (SEQ ID NO. 18) carries one or more of the following chemical modifications: acetylation, deamidation, and pyroglutamation (pyro Glu), and the last amino acid residue of the heavy chain CDR1 (i.e., the N in GYDFTHYGMN (SEQ ID NO. 20)) is not acetylated. The anti-VEGF antigen-binding fragments and transgenes provided herein can be used in any method according to the invention described herein. In a preferred embodiment, the chemical modification(s) or lack of chemical modification(s) (as the case may be) described herein is determined by mass spectrometry.

[0921] In certain aspects, also provided herein are anti-VEGF antigen-binding fragments comprising light chain CDRs 1-3 of SEQ ID NOs: 14-16 and heavy chain CDRs 1-3 of SEQ ID NOs: 20, 18, and 21, and transgenes encoding such antigen-VEGF antigen-binding fragments, wherein the last amino acid residue of the heavy chain CDR1 (i.e., the N in GYDFTHYGMN (SEQ ID NO. 20)) does not carry one or more of the following chemical modifications: oxidation, acetylation, deamidation, and pyroglutamation (pyro Glu), and the second amino acid residue of the light chain CDR3 (i.e., the second Q in QQYSTVPWTF (SEQ ID NO. 16)) does not carry one or more of the following chemical modifications: oxidation, acetylation, deamidation, and pyroglutamation (pyro Glu). In a specific embodiment, the antigen-binding fragment comprises light chain CDRs 1-3 of SEQ ID NOs: 14-16 and heavy chain CDRs 1-3 of SEQ ID NOs: 20, 18, and 21, wherein: (1) the ninth amino acid residue of the heavy chain CDR1 (i.e., the M in GYDFTHYGMN (SEQ ID NO. 20)) carries one or more of the following chemical modifications: acetylation, deamidation, and pyroglutamation (pyro Glu), the third amino acid residue of the heavy chain CDR2 (i.e., the N in WINTYTGEPTYAADFKR (SEQ ID NO. 18) carries one or more of the following chemical modifications: acetylation, deamidation, and pyroglutamation (pyro Glu), and the last amino acid residue of the heavy chain CDR1 (i.e., the N in GYDFTHYGMN (SEQ ID NO. 20)) does not carry one or more of the following chemical modifications: oxidation, acetylation, deamidation, and pyroglutamation (pyro Glu); and (2) the eighth and eleventh amino acid residues of the light chain CDR1 (i.e., the two Ns in SASQDISNYLN (SEQ ID NO. 14) each carries one or more of the following chemical modifications: oxidation, acetylation, deamidation, and pyroglutamation (pyro Glu), and the second amino acid residue of the light chain CDR3 (i.e., the second Q in QQYSTVPWTF (SEQ ID NO. 16)) does not carry one or more of the following chemical modifications: oxidation, acetylation, deamidation, and pyroglutamation (pyro Glu). In a specific embodiment, the antigen-binding fragment comprises light chain CDRs 1-3 of SEQ ID NOs: 14-16 and heavy chain CDRs 1-3 of SEQ ID NOs: 20, 18, and 21, wherein the last amino acid residue of the heavy chain CDR1 (i.e., the N in GYDFTHYGMN (SEQ ID NO. 20)) is not acetylated, and the second amino acid residue of the light chain CDR3 (i.e., the second Q in QQYSTVPWTF (SEQ ID NO. 16)) is not acetylated. In a specific embodiment, the antigen-binding fragment comprises light chain CDRs 1-3 of SEQ ID NOs: 14-16 and heavy chain CDRs 1-3 of SEQ ID NOs: 20, 18, and 21, wherein: (1) the ninth amino acid residue of the heavy chain CDR1 (i.e., the M in GYDFTHYGMN (SEQ ID NO. 20)) carries one or more of the following chemical modifications: acetylation, deamidation, and pyroglutamation (pyro Glu), the third amino acid residue of the heavy chain CDR2 (i.e., the N in WINTYTGEPTYAADFKR (SEQ ID NO. 18) carries one or more of the following chemical modifications: acetylation, deamidation, and pyroglutamation (pyro Glu), and the last amino acid residue of the heavy chain CDR1 (i.e., the N in GYDFTHYGMN (SEQ ID NO. 20)) is not acetylated; and (2) the eighth and eleventh amino acid residues of the light chain CDR1 (i.e., the two Ns in SASQDISNYLN (SEQ ID NO. 14) each carries one or more of the following chemical modifications: oxidation, acetylation, deamidation, and pyroglutamation (pyro Glu), and the second amino acid residue of the light chain CDR3 (i.e., the second Q in QQYSTVPWTF (SEQ ID NO. 16)) is not acetylated. The anti-VEGF antigen-binding fragments and transgenes provided herein can be used in any method according to the invention described herein. In a preferred embodiment, the chemical modification(s) or lack of chemical modification(s) (as the case may be) described herein is determined by mass spectrometry.

TABLE 2
Exemplary anti-VEGF transgene and antibody sequences

| VEGF antigen- | |
|---|---|
| binding fragment | |
| (SEQ ID NO.) | Sequence |
| bevacizumab cDNA | gctagcgcca ccatgggctg gtcctgcatc atcctgttcc tggtggccac |
| (Light chain) | cgccaccggc gtgcactccg acatccagat gacccagtcc ccctcctccc |
| (10) | tgtccgcctc cgtgggcgac cgggtgacca tcacctgctc cgcctcccag |
| | gacatctcca actacctgaa ctggtaccag cagaagcccg gcaaggcccc |
| | caaggtgctg atctacttca cctcctccct gcactccggc gtgccctccc |
| | ggttctccgg ctccggctcc ggcaccgact tcaccctgac catctcctcc |
| | ctgcagcccg aggacttcgc cacctactac tgccagcagt actccaccgt |
| | gccctggacc ttcggccagg gcaccaaggt ggagatcaag cggaccgtgg |
| | ccgccccctc cgtgttcatc ttccccccct ccgacgagca gctgaagtcc |
| | ggcaccgcct ccgtggtgtg cctgctgaac aacttctacc cccgggaggc |
| | caaggtgcag tggaaggtgg acaacgccct gcagtccggc aactcccagg |
| | agtccgtgac cgagcaggac tccaaggact ccacctactc cctgtcctcc |
| | accctgaccc tgtccaaggc cgactacgag aagcacaagg tgtacgcctg |
| | cgaggtgacc caccagggcc tgtcctcccc cgtgaccaag tccttcaacc |
| | ggggcgagtg ctgagcggcc gcctcgag |
| bevacizumab cDNA | gctagcgcca ccatgggctg gtcctgcatc atcctgttcc tggtggccac |
| (Heavy chain) | cgccaccggc gtgcactccg aggtgcagct ggtggagtcc ggcggcggcc |
| (11) | tggtgcagcc cggcggctcc ctgcggctgt cctgcgccgc ctccggctac |
| | accttcacca actacggcat gaactgggtg cggcaggccc ccggcaaggg |
| | cctggagtgg gtgggctgga tcaacaccta caccggcgag cccacctacg |
| | ccgccgactt caagcggcgg ttcaccttct ccctggacac ctccaagtcc |
| | accgcctacc tgcagatgaa ctccctgcgg gccgaggaca ccgccgtgta |
| | ctactgcgcc aagtaccccc actactacgg ctcctcccac tggtacttcg |
| | acgtgtgggg ccagggcacc ctggtgaccg tgtcctccgc ctccaccaag |
| | ggcccctccg tgttccccct ggccccctcc tccaagtcca cctccggcgg |
| | caccgccgcc ctgggctgcc tggtgaagga ctacttcccc gagcccgtga |
| | ccgtgtcctg gaactccggc gccctgacct ccggcgtgca caccttcccc |
| | gccgtgctgc agtcctccgg cctgtactcc ctgtcctccg tggtgaccgt |
| | gccctcctcc tccctgggca cccagaccta catctgcaac gtgaaccaca |
| | agccctccaa caccaaggtg gacaagaagg tggagcccaa gtcctgcgac |
| | aagacccaca cctgcccccc ctgccccgcc cccgagctgc tgggcggccc |
| | ctccgtgttc ctgttccccc ccaagcccaa ggacaccctg atgatctccc |
| | ggacccccga ggtgacctgc gtggtggtgg acgtgtccca cgaggacccc |
| | gaggtgaagt tcaactggta cgtggacggc gtggaggtgc acaacgccaa |
| | gaccaagccc cgggaggagc agtacaactc cacctaccgg gtggtgtccg |
| | tgctgaccgt gctgcaccag gactggctga acggcaagga gtacaagtgc |
| | aaggtgtcca acaaggccct gcccgccccc atcgagaaga ccatctccaa |
| | ggccaagggc cagccccggg agccccaggt gtacaccctg cccccctccc |
| | gggaggagat gaccaagaac caggtgtccc tgacctgcct ggtgaagggc |
| | ttctacccct ccgacatcgc cgtggagtgg gagtccaacg gccagcccga |
| | gaacaactac aagaccaccc cccccgtgct ggactccgac ggctccttct |
| | tcctgtactc caagctgacc gtggacaagt cccggtggca gcagggcaac |
| | gtgttctcct gctccgtgat gcacgaggcc ctgcacaacc actacaccca |
| | gaagtccctg tccctgtccc ccggcaagtg agcggccgcc |
| bevacizumab Fab | DIQMTQSPSSLSASVGDRVTITCSASQDISNYLNWYQQKPGKAPKVLIYFTSSLH |
| Amino Acid | SGVPSRFSGSGSGTDFTLTISSLQPEDFATYYCQQYSTVPWTFGQGTKVEIKRTV |
| Sequence (Light | AAPSVFIFPPSDEQLKSGTASVVCLLNNFYPREAKVQWKVDNALQSGNSQESVTE |
| chain) | QDSKDSTYSLSSTLTLSKADYEKHKVYACEVTHQGLSSPVTKSFNRGEC |
| (3) | |
| bevacizumab Fab | EVQLVESGGGLVQPGGSLRLSCAASGYTFTNYGMNWVRQAPGKGLEWVGWINTYT |
| Amino Acid | GEPTYAADFKRRFTFSLDTSKSTAYLQMNSLRAEDTAVYYCAKYPHYYGSSHWYF |
| Sequence (Heavy | DVWGQGTLVTVSSASTKGPSVFPLAPSSKSTSGGTAALGCLVKDYFPEPVTVSWN |
| chain) | SGALTSGVHTFPAVLQSSGLYSLSSVVTVPSSSLGTQTYICNVNHKPSNTKVDKK |
| (4) | VEPKSCDKTHL |
| ranibizumab cDNA | gagctccatg gagtttttca aaaagacggc acttgccgca ctggttatgg |
| (Light chain | gttttagtgg tgcagcattg gccgatatcc agctgaccca gagcccgagc |
| comprising a | agcctgagcg caagcgttgg tgatcgtgtt accattacct gtagcgcaag |
| signal sequence) | ccaggatatt agcaattatc tgaattggta tcagcagaaa ccgggtaaag |
| (12) | caccgaaagt tctgatttat tttaccagca gcctgcatag cggtgttccg |
| | agccgtttta gcggtagcgg tagtggcacc gattttaccc tgaccattag |
| | cagcctgcag ccggaagatt ttgcaaccta ttattgtcag cagtatagca |
| | ccgttccgtg gacctttggt cagggcacca aagttgaaat taaacgtacc |
| | gttgcagcac cgagcgtttt tatttttccg cctagtgatg aacagctgaa |
| | aagcggcacc gcaagcgttg tttgtctgct gaataatttt tatccgcgtg |
| | aagcaaaagt gcagtggaaa gttgataatg cactgcagag cggtaatagc |
| | caagaaagcg ttaccgaaca ggatagcaaa gatagcacct atagcctgag |
| | cagcaccctg accctgagca aagcagatta tgaaaaacac aaagtgtatg |
| | cctgcgaagt tacccatcag ggtctgagca gtccggttac caaaagtttt |
| | aatcgtggcg aatgctaata gaagcttggt acc |
| ranibizumab cDNA | gagctcatat gaaatacctg ctgccgaccg ctgctgctgg tctgctgctc |
| (Heavy chain | ctcgctgccc agccggcgat ggccgaagtt cagctggttg aaagcggtgg |
| comprising a | tggtctggtt cagcctggtg gtagcctgcg tctgagctgt gcagcaagcg |
| signal sequence) | gttatgattt tacccattat ggtatgaatt gggttcgtca ggcaccgggt |
| (13) | aaaggtctgg aatgggttgg ttggattaat acctataccg gtgaaccgac |
| | ctatgcagca gattttaaac gtcgttttac ctttagcctg gataccagca |
| | aaagcaccgc atatctgcag atgaatagcc tgcgtgcaga agataccgca |
| | gtttattatt gtgccaaata tccgtattac tatggcacca gccactggta |
| | tttcgatgtt tggggtcagg gcaccctggt taccgttagc agcgcaagca |
| | ccaaaggtcc gagcgttttt ccgctggcac cgagcagcaa aagtaccagc |
| | ggtggcacag cagcactggg ttgtctggtt aaagattatt ttccggaacc |
| | ggttaccgtg agctggaata gcggtgcact gaccagcggt gttcatacct |
| | ttccggcagt tctgcagagc agcggtctgt atagcctgag cagcgttgtt |
| | accgttccga gcagcagcct gggcacccag acctatattt gtaatgttaa |
| | tcataaaccg agcaatacca aagtggataa aaaagttgag ccgaaaagct |
| | gcgataaaac ccatctgtaa tagggtacc |
| ranibizumab Fab | DIQLTQSPSSLSASVGDRVTITCSASQDISNYLNWYQQKPGKAPKVLIYFTSSLH |
| Amino Acid | SGVPSRFSGSGSGTDFTLTISSLQPEDFATYYCQQYSTVPWTFGQGTKVEIKRTV |
| Sequence (Light | AAPSVFIFPPSDEQLKSGTASVVCLLNNFYPREAKVQWKVDNALQSGNSQESVTE |
| chain) | QDSKDSTYSLSSTLTLSKADYEKHKVYACEVTHQGLSSPVTKSFNRGEC |
| (1) | |
| ranibizumab Fab | EVQLVESGGGLVQPGGSLRLSCAASGYDFTHYGMNWVRQAPGKGLEWVGWINTYT |
| Amino Acid | GEPTYAADFKRRFTFSLDTSKSTAYLQMNSLRAEDTAVYYCAKYPYYYGTSHWYF |
| Sequence (Heavy | DVWGQGTLVTVSSASTKGPSVFPLAPSSKSTSGGTAALGCLVKDYFPEPVTVSWN |
| chain) | SGALTSGVHTFPAVLQSSGLYSLSSVVTVPSSSLGTQTYICNVNHKPSNTKVDKK |
| (2) | VEPKSCDKTHL |
| bevacizumab Light | SASQDISNYLN |
| Chain CDRs | FTSSLHS |
| (14, 15, and 16) | QQYSTVPWT |
| bevacizumab Heavy | GYTFTNYGMN |
| Chain CDRs | WINTYTGEPTYAADFKR |
| (17, 18, and 19) | YPHYYGSSHWYFDV |
| ranibizumab Light | SASQDISNYLN |
| Chain CDRs | FTSSLHS |
| (14, 15, and 16) | QQYSTVPWT |
| ranibizumab Heavy | GYDFTHYGMN |
| Chain CDRs | WINTYTGEPTYAADFKR |
| (20, 18, and 21) | YPYYYGTSHWYFDV |

[0922] In certain embodiments, the recombinant vectors provided herein comprise the following elements in the following order: a) a constitutive or a hypoxia-inducible promoter sequence, and b) a sequence encoding the transgene (e.g., an anti-VEGF antigen-binding fragment moiety). In certain embodiments, the sequence encoding the transgene comprises multiple ORFs separated by IRES elements. In certain embodiments, the ORFs encode the heavy and light chain domains of the anti-VEGF antigen-binding fragment. In certain embodiments, the sequence encoding the transgene comprises multiple subunits in one ORF separated by F/F2A sequences. In certain embodiments, the sequence comprising the transgene encodes the heavy and light chain domains of the anti-VEGF antigen-binding fragment separated by an F/F2A sequence. In certain embodiments, the viral vectors provided herein comprise the following elements in the following order: a) a constitutive or a hypoxia-inducible promoter sequence, and b) a sequence encoding the transgene (e.g., an anti-VEGF antigen-binding fragment moiety), wherein the transgene comprises the signal peptide of VEGF (SEQ ID NO: 5), and wherein the transgene encodes a light chain and a heavy chain sequence separated by an IRES element. In certain embodiments, the recombinant vectors provided herein comprise the following elements in the following order: a) a constitutive or a hypoxia-inducible promoter sequence, and b) a sequence encoding the transgene (e.g., an anti-VEGF antigen-binding fragment moiety), wherein the transgene comprises the signal peptide of VEGF (SEQ ID NO: 5), and wherein the transgene encodes a light chain and a heavy chain sequence separated by a cleavable F/F2A sequence.

[0923] In certain embodiments, the recombinant vectors provided herein comprise the following elements in the following order: a) a first ITR sequence, b) a first linker sequence, c) a constitutive or a hypoxia-inducible promoter sequence, d) a second linker sequence, e) an intron sequence, f) a third linker sequence, g) a first UTR sequence, h) a sequence encoding the transgene (e.g., an anti-VEGF antigen-binding fragment moiety), i) a second UTR sequence, j) a fourth linker sequence, k) a poly A sequence, 1) a fifth linker sequence, and m) a second ITR sequence.

[0924] In certain embodiments, the recombinant vectors provided herein comprise the following elements in the following order: a) a first ITR sequence, b) a first linker sequence, c) a constitutive or a hypoxia-inducible promoter sequence, d) a second linker sequence, e) an intron sequence, f) a third linker sequence, g) a first UTR sequence, h) a sequence encoding the transgene (e.g., an anti-VEGF antigen-binding fragment moiety), i) a second UTR sequence, j) a fourth linker sequence, k) a poly A sequence, 1) a fifth linker sequence, and m) a second ITR sequence, wherein the transgene comprises the signal peptide of VEGF (SEQ ID NO: 5), and wherein the transgene encodes a light chain and a heavy chain sequence separated by a cleavable F/F2A sequence.

[0925] In a specific embodiment, the recombinant vector provided herein is Construct II, wherein the Construct II comprise the following components: (1) AAV2 inverted terminal repeats that flank the expression cassette; (2) control elements, which include a) the CB7 promoter, comprising the CMV enhancer/chicken β-actin promoter, b) a chicken β-actin intron and c) a rabbit β-globin poly A signal; and (3) nucleic acid sequences coding for the heavy and light chains of anti-VEGF antigen-binding fragment, separated by a self-cleaving furin (F)/F2A linker, ensuring expression of equal amounts of the heavy and the light chain polypeptides. In a specific embodiment, the construct described herein is illustrated in FIG. 5.

[0926] 6.3.3 Gene Therapy

### (a) Target Patient Populations

[0927] In certain embodiments, the methods provided herein are for the administration to patients diagnosed with an ocular disease (for example, wet AMD, dry AMD, retinal vein occlusion (RVO), diabetic macular edema (DME), or diabetic retinopathy (DR) (in particular, wet AMD)), in particular an ocular disease caused by increased neovascularization.

[0928] In certain embodiments, the methods provided herein are for the administration to patients diagnosed with severe AMD. In certain embodiments, the methods provided herein are for the administration to patients diagnosed with attenuated AMD.

[0929] In certain embodiments, the methods provided herein are for the administration to patients diagnosed with severe wet AMD. In certain embodiments, the methods provided herein are for the administration to patients diagnosed with attenuated wet AMD.

[0930] In certain embodiments, the methods provided herein are for the administration to patients diagnosed with severe diabetic retinopathy. In certain embodiments, the methods provided herein are for the administration to patients diagnosed with attenuated diabetic retinopathy.

[0931] In certain embodiments, the methods provided herein are for the administration to patients diagnosed with AMD who have been identified as responsive to treatment with an anti-VEGF antibody.

[0932] In certain embodiments, the methods provided herein are for the administration to patients diagnosed with AMD who have been identified as responsive to treatment with an anti-VEGF antigen-binding fragment.

[0933] In certain embodiments, the methods provided herein are for the administration to patients diagnosed with AMD who have been identified as responsive to treatment with an anti-VEGF antigen-binding fragment injected intravitreally prior to treatment with gene therapy.

[0934] In certain embodiments, the methods provided herein are for the administration to patients diagnosed with AMD who have been identified as responsive to treatment with LUCENTIS® (ranibizumab), EYLEA® (aflibercept), and/or AVASTIN® (bevacizumab).

[0935] In certain embodiments, a patient diagnosed with AMD is identified as responsive to treatment with an anti-VEGF antigen-binding fragment (e.g., ranibizumab) if the patient has improvement in fluid after intravitreal injection of the anti-VEGF antigen-binding fragment to the patient prior to treatment with gene therapy. In certain embodiments, a patient diagnosed with AMD is identified as responsive to treatment with an anti-VEGF antigen-binding fragment (e.g., ranibizumab) if the patient has improvement in fluid and has a central retinal thickness (CRT) <400 μm after intravitreal injection of the anti-VEGF antigen-binding fragment to the patient prior to treatment with gene therapy. In some embodiments, the anti-VEGF antigen-binding fragment is intravitreally injected to the patient at 0.5 mg per month for two months prior to treatment with gene therapy. In other embodiments, the anti-VEGF antigen-binding fragment is intravitreally injected to the patient at 0.5 mg per month for three months prior to treatment with gene therapy. In a preferred embodiment, a patient has improvement in fluid if he or she has an improvement in inner retinal (parafovea 3 mm) fluid of >50 μm or 30% relative to the level prior to the intravitreal injection of the anti-VEGF antigen-binding fragment, or has an improvement in center subfield thickness of >50 μm or 30% as determined by the CRC relative to the level prior to the intravitreal injection of the anti-VEGF antigen-binding fragment.

[0936] In certain embodiments, the methods provided herein are for the administration to patients diagnosed with AMD who have disease other than fluid contributing to an increase in CRT (i.e., pigment epithelial detachment (PED) or subretinal hyperreflective material (SHRM)) and who have <75 μm of fluid (intraretinal or subretinal), as determined by the CRC.

[0937] In certain embodiments of the methods described herein, the patient has a BCVA in the eye to be treated that is ≤20/20 and ≥20/400 before treatment. In a specific embodiment, the patient has a BCVA in the eye to be treated that is ≤20/63 and ≥20/400 before treatment.

[0938] In certain embodiments of the methods described herein, the patient has an Early Treatment Diabetic Retinopathy Study (ETDRS) BCVA letter score between ≤78 and ≥44 in the eye to be treated before treatment.

[0939] In certain embodiments of the methods described herein, the patient is not concurrently having an anticoagulation therapy.

### (b) Dosage

[0940] In certain embodiments, doses that maintain a concentration of the therapeutic product at a Cₘᵢₙ of at least 0.330 μg/mL in the Vitreous humour, or 0.110 μg/mL in the Aqueous humour (the anterior chamber of the eye) for three months are desired; thereafter, Vitreous Cₘᵢₙ concentrations of the therapeutic product ranging from 1.70 to 6.60 μg/mL, and/or Aqueous Cₘᵢₙ concentrations ranging from 0.567 to 2.20 μg/mL should be maintained. However, because the therapeutic product is continuously produced (under the control of a constitutive promoter or induced by hypoxic conditions when using an hypoxia-inducible promoter), maintenance of lower concentrations can be effective. Vitreous humour concentrations can be measured directly in patient samples of fluid collected from the vitreous humour or the anterior chamber, or estimated and/or monitored by measuring the patient's serum concentrations of the therapeutic product—the ratio of systemic to vitreal exposure to the therapeutic product is about 1:90,000. (E.g., see, vitreous humor and serum concentrations of ranibizumab reported in Xu L, et al., 2013, Invest. Opthal. Vis. Sci. 54: 1616-1624, at p. 1621 and Table 5 at p. 1623, which is incorporated by reference herein in its entirety).

[0941] In certain embodiments, dosages are measured by genome copies per ml or the number of genome copies administered to the eye of the patient (e.g., administered suprachoroidally, subretinally, intravitreally, juxtasclerally, subconjunctivally, and/or intraretinally (e.g., by suprachoroidal injection, subretinal injection via the transvitreal approach (a surgical procedure), subretinal administration via the suprachoroidal space, or a posterior juxtascleral depot procedure)). In certain embodiments, 2.4×10¹¹ genome copies per ml to 1×10¹³ genome copies per ml are administered. In a specific embodiment, 2.4×10¹¹ genome copies per ml to 5×10¹¹ genome copies per ml are administered. In another specific embodiment, 5×10¹¹ genome copies per ml to 1×10¹² genome copies per ml are administered. In another specific embodiment, 1×10¹² genome copies per ml to 5×10¹² genome copies per ml are administered. In another specific embodiment, 5×10¹² genome copies per ml to 1×10¹³ genome copies per ml are administered. In another specific embodiment, about 2.4×10¹¹ genome copies per ml are administered. In another specific embodiment, about 5×10¹¹ genome copies per ml are administered. In another specific embodiment, about 1×10¹² genome copies per ml are administered. In another specific embodiment, about 5×10¹² genome copies per ml are administered. In another specific embodiment, about 1×10¹³ genome copies per ml are administered. In certain embodiments, 1×10⁹ to 1×10¹² genome copies are administered. In specific embodiments, 3×10⁹ to 2.5×10¹¹ genome copies are administered. In specific embodiments, 1×10⁹ to 2.5×10¹¹ genome copies are administered. In specific embodiments, 1×10⁹ to 1×10¹¹ genome copies are administered. In specific embodiments, 1×10⁹ to 5×10⁹ genome copies are administered. In specific embodiments, 6×10⁹ to 3×10¹⁰ genome copies are administered. In specific embodiments, 4×10¹⁰ to 1×10¹¹ genome copies are administered. In specific embodiments, 2×10¹¹ to 1×10¹² genome copies are administered. In a specific embodiment, about 3×10⁹ genome copies are administered (which corresponds to about 1.2×10¹⁰ genome copies per ml in a volume of 250 μl). In another specific embodiment, about 1×10¹⁰ genome copies are administered (which corresponds to about 4×10¹⁰ genome copies per ml in a volume of 250 μl). In another specific embodiment, about 6×10¹⁰ genome copies are administered (which corresponds to about 2.4×10¹¹ genome copies per ml in a volume of 250 μl). In another specific embodiment, about 1.6×10¹¹ genome copies are administered (which corresponds to about 6.2×10¹¹ genome copies per ml in a volume of 250 μl). In another specific embodiment, about 1.55×10¹¹ genome copies are administered (which corresponds to about 6.2×10¹¹ genome copies per ml in a volume of 250 μl). In another specific embodiment, about 2.5×10¹¹ genome copies (which corresponds to about 1.0×10¹² genome copies per ml in a volume of 250 μl) are administered.

[0942] In certain embodiments, about 6.0×10¹⁰ genome copies per eye are administered. In certain embodiments, about 1.6×10¹¹ genome copies per eye are administered. In certain embodiments, about 2.5×10¹¹ genome copies per eye are administered. In certain embodiments, about 5.0×10¹¹ genome copies per eye are administered. In certain embodiments, about 3×10¹² genome copies per eye are administered. In certain embodiments, about 1.0×10¹² genome copies per ml per eye are administered. In certain embodiments, about 2.5×10¹² genome copies per ml per eye are administered. In certain embodiments, about 3.0×10¹³ genome copies per eye are administered. In certain embodiments, up to 3.0×10¹³ genome copies per eye are administered.

[0943] In certain embodiments, about 6.0×10¹⁰ genome copies per eye are administered by subretinal injection. In certain embodiments, about 1.6×10¹¹ genome copies per eye are administered by subretinal injection. In certain embodiments, about 2.5×10¹¹ genome copies per eye are administered by subretinal injection. In certain embodiments, about 3.0×10¹³ genome copies per eye are administered by subretinal injection. In certain embodiments, up to 3.0×10¹³ genome copies per eye are administered by subretinal injection.

[0944] In certain embodiments, about 2.5×10¹¹ genome copies per eye are administered by suprachoroidal injection. In certain embodiments, about 5.0×10¹¹ genome copies per eye are administered by suprachoroidal injection. In certain embodiments, about 3×10¹² genome copies per eye are administered by suprachoroidal injection. In certain embodiments, about 2.5×10¹¹ genome copies per eye are administered by a single suprachoroidal injection. In certain embodiments, about 5.0×10¹¹ genome copies per eye are administered by double suprachoroidal injections. In certain embodiments, about 3.0×10¹³ genome copies per eye are administered by suprachoroidal injection. In certain embodiments, up to 3.0×10¹³ genome copies per eye are administered suprachoroidal injection. In certain embodiments, about 2.5×10¹² genome copies per ml per eye are administered by a single suprachoroidal injection in a volume of 100 μl. In certain embodiments, about 2.5×10¹² genome copies per ml per eye are administered by double suprachoroidal injections, wherein each injection is in a volume of 100 μl.

[0945] As used herein and unless otherwise specified, the term “about” means within plus or minus 10% of a given value or range. In certain embodiments, the term “about” encompasses the exact number recited.

### (c) Sampling and Monitoring of Efficacy

[0946] Effects of the methods provided herein on visual deficits may be measured by BCVA (Best-Corrected Visual Acuity), intraocular pressure, slit lamp biomicroscopy, and/or indirect ophthalmoscopy.

[0947] In specific embodiments, effects of the methods provided herein on visual deficits may be measured by whether the human patient's eye that is treated by a method described herein achieves BCVA of greater than 43 letters post-treatment (e.g., 46-50 weeks or 98-102 weeks post-treatment). A BCVA of 43 letters corresponds to 20/160 approximate Snellen equivalent. In a specific embodiment, the human patient's eye that is treated by a method described herein achieves BCVA of greater than 43 letters post-treatment (e.g., 46-50 weeks or 98-102 weeks post-treatment).

[0948] In specific embodiments, effects of the methods provided herein on visual deficits may be measured by whether the human patient's eye that is treated by a method described herein achieves BCVA of greater than 84 letters post-treatment (e.g., 46-50 weeks or 98-102 weeks post-treatment). A BCVA of 84 letters corresponds to 20/20 approximate Snellen equivalent. In a specific embodiment, the human patient's eye that is treated by a method described herein achieves BCVA of greater than 84 letters post-treatment (e.g., 46-50 weeks or 98-102 weeks post-treatment).

[0949] Effects of the methods provided herein on physical changes to eye/retina may be measured by SD-OCT (SD-Optical Coherence Tomography).

[0950] Efficacy may be monitored as measured by electroretinography (ERG).

[0951] Effects of the methods provided herein may be monitored by measuring signs of vision loss, infection, inflammation and other safety events, including retinal detachment.

[0952] Retinal thickness may be monitored to determine efficacy of the methods provided herein. Without being bound by any particular theory, thickness of the retina may be used as a clinical readout, wherein the greater reduction in retinal thickness or the longer period of time before thickening of the retina, the more efficacious the treatment. Retinal function may be determined, for example, by ERG. ERG is a non-invasive electrophysiologic test of retinal function, approved by the FDA for use in humans, which examines the light sensitive cells of the eye (the rods and cones), and their connecting ganglion cells, in particular, their response to a flash stimulation. Retinal thickness may be determined, for example, by SD-OCT. SD-OCT is a three-dimensional imaging technology which uses low-coherence interferometry to determine the echo time delay and magnitude of backscattered light reflected off an object of interest. OCT can be used to scan the layers of a tissue sample (e.g., the retina) with 3 to 15 μm axial resolution, and SD-OCT improves axial resolution and scan speed over previous forms of the technology (Schuman, 2008, Trans. Am. Opthamol. Soc. 106:426-458).

[0953] Effects of the methods provided herein may also be measured by a change from baseline in National Eye Institute Visual Functioning Questionnaire, the Rasch-scored version (NEI-VFQ-28-R) (composite score; activity limitation domain score; and socio-emotional functioning domain score). Effects of the methods provided herein may also be measured by a change from baseline in National Eye Institute Visual Functioning Questionnaire 25-item version (NEI-VFQ-25) (composite score and mental health subscale score). Effects of the methods provided herein may also be measured by a change from baseline in Macular Disease Treatment Satisfaction Questionnaire (MacTSQ) (composite score; safety, efficacy, and discomfort domain score; and information provision and convenience domain score).

[0954] In specific embodiments, the efficacy of a method described herein is reflected by an improvement in vision at about 4 weeks, 12 weeks, 6 months, 12 months, 24 months, 36 months, or at other desired timepoints. In a specific embodiment, the improvement in vision is characterized by an increase in BCVA, for example, an increase by 1 letter, 2 letters, 3 letters, 4 letters, 5 letters, 6 letters, 7 letters, 8 letters, 9 letters, 10 letters, 11 letters, or 12 letters, or more. In a specific embodiment, the improvement in vision is characterized by a 5%, 10%, 15%, 20%, 30%, 40%, 50% or more increase in visual acuity from baseline.

[0955] In specific embodiments, the efficacy of a method described herein is reflected by an reduction in central retinal thickness (CRT) at about 4 weeks, 12 weeks, 6 months, 12 months, 24 months, 36 months, or at other desired timepoint, for example, a 5%, 10%, 15%, 20%, 30%, 40%, 50% or more decrease in central retinal thickness from baseline.

[0956] In specific embodiments, there is no inflammation in the eye after treatment or little inflammation in the eye after treatment (for example, an increase in the level of inflammation by 10%, 5%, 2%, 1% or less from baseline).

[0957] If the human patient is a child, visual function can be assessed using an optokinetic nystagmus (OKN)-based approach or a modified OKN-based approach.

[0958] 6.4 Combination Therapies

[0959] The methods provided herein may be combined with one or more additional therapies. In one aspect, the methods provided herein are administered with laser photocoagulation. In one aspect, the methods provided herein are administered with photodynamic therapy with verteporfin.

[0960] In one aspect, the methods provided herein are administered with intravitreal (IVT) injections with the therapeutic product. In a specific embodiment wherein the therapeutic product is an anti-VEGF antibody or antigen-binding fragment, the methods provided herein are administered with IVT injections with anti-VEGF agents, including but not limited to HuPTMFabVEGFi, e.g., HuGlyFabVEGFi produced in human cell lines (Dumont et al., 2015, supra), or other anti-VEGF agents such as pegaptanib, ranibizumab, aflibercept, or bevacizumab.

[0961] The additional therapies may be administered before, concurrently or subsequent to the gene therapy treatment.

[0962] The efficacy of the gene therapy treatment may be indicated by the elimination of or reduction in the number of rescue treatments using standard of care. For example, when the therapeutic product is anti-VEGF antibody or antigen-binding fragment, the efficacy of the gene therapy treatment may be indicated by the elimination or reduction in the number of rescue treatments of intravitreal injections with anti-VEGF agents, including but not limited to HuPTMFabVEGFi, e.g., HuGlyFabVEGFi produced in human cell lines, or other anti-VEGF agents such as pegaptanib, ranibizumab, aflibercept, or bevacizumab.

### 7. SEQUENCES

SEQ ID NO: 1
RANIBIZUMAB FAB AMINO ACID SEQUENCE (LIGHT CHAIN)
DIQLTQSPSSLSASVGDRVTITCSASQDISNYLNWYQQKPGKAPKVLIYFTSSLH
SGVPSRFSGSGSGTDFTLTISSLQPEDFATYYCQQYSTVPWTFGQGTKVEIKRTV
AAPSVFIFPPSDEQLKSGTASVVCLLNNFYPREAKVQWKVDNALQSGNSQESVTE
QDSKDSTYSLSSTLTLSKADYEKHKVYACEVTHQGLSSPVTKSENRGEC
SEQ ID NO: 2
RANIBIZUMAB FAB AMINO ACID SEQUENCE (HEAVY CHAIN)
EVQLVESGGGLVQPGGSLRLSCAASGYDFTHYGMNWVRQAPGKGLEWVGWINTYT
GEPTYAADFKRRFTESLDTSKSTAYLQMNSLRAEDTAVYYCAKYPYYYGTSHWYF
DVWGQGTLVTVSSASTKGPSVFPLAPSSKSTSGGTAALGCLVKDYFPEPVTVSWN
SGALTSGVHTFPAVLQSSGLYSLSSVVTVPSSSLGTQTYICNVNHKPSNTKVDKK
VEPKSCDKTHL
SEQ ID NO: 3
BEVACIZUMAB FAB AMINO ACID SEQUENCE (LIGHT CHAIN)
DIQMTQSPSSLSASVGDRVTITCSASQDISNYLNWYQQKPGKAPKVLIYFTSSLH
SGVPSRFSGSGSGTDFTLTISSLQPEDFATYYCQQYSTVPWTFGQGTKVEIKRTV
AAPSVFIFPPSDEQLKSGTASVVCLLNNFYPREAKVQWKVDNALQSGNSQESVTE
QDSKDSTYSLSSTLTLSKADYEKHKVYACEVTHQGLSSPVTKSENRGEC
SEQ ID NO: 4
BEVACIZUMAB FAB AMINO ACID SEQUENCE (HEAVY CHAIN)
EVQLVESGGGLVQPGGSLRLSCAASGYTFTNYGMNWVRQAPGKGLEWVGWINTYT
GEPTYAADFKRRFTFSLDTSKSTAYLQMNSLRAEDTAVYYCAKYPHYYGSSHWYF
DVWGQGTLVTVSSASTKGPSVFPLAPSSKSTSGGTAALGCLVKDYFPEPVTVSWN
SGALTSGVHTFPAVLQSSGLYSLSSVVTVPSSSLGTQTYICNVNHKPSNTKVDKK
VEPKSCDKTHL
SEQ ID NO: 5
VEGF-A SIGNAL PEPTIDE
MNFLLSWVHW SLALLLYLHH AKWSQA
SEQ ID NO: 6
FIBULIN-1 SIGNAL PEPTIDE
MERAAPSRRV PLPLLLLGGL ALLAAGVDA
SEQ ID NO: 7
VITRONECTIN SIGNAL PEPTIDE
MAPLRPLLIL ALLAWVALA
SEQ ID NO: 8
COMPLEMENT FACTOR H SIGNAL PEPTIDE
MRLLAKIICLMLWAICVA
SEQ ID NO: 9
OPTICIN SIGNAL PEPTIDE
MRLLAFLSLL ALVLQETGT
SEQ ID NO: 10
BEVACIZUMAB CDNA (LIGHT CHAIN)
GCTAGCGCCA CCATGGGCTG GTCCTGCATC ATCCTGTTCC TGGTGGCCAC CGCCACCGGC GTGCACTCCG
ACATCCAGAT GACCCAGTCC CCCTCCTCCC TGTCCGCCTC CGTGGGCGAC CGGGTGACCA TCACCTGCTC
CGCCTCCCAG GACATCTCCA ACTACCTGAA CTGGTACCAG CAGAAGCCCG GCAAGGCCCC CAAGGTGCTG
ATCTACTTCA CCTCCTCCCT GCACTCCGGC GTGCCCTCCC GGTTCTCCGG CTCCGGCTCC GGCACCGACT
TCACCCTGAC CATCTCCTCC CTGCAGCCCG AGGACTTCGC CACCTACTAC TGCCAGCAGT ACTCCACCGT
GCCCTGGACC TTCGGCCAGG GCACCAAGGT GGAGATCAAG CGGACCGTGG CCGCCCCCTC CGTGTTCATC
TTCCCCCCCT CCGACGAGCA GCTGAAGTCC GGCACCGCCT CCGTGGTGTG CCTGCTGAAC AACTTCTACC
CCCGGGAGGC CAAGGTGCAG TGGAAGGTGG ACAACGCCCT GCAGTCCGGC AACTCCCAGG AGTCCGTGAC
CGAGCAGGAC TCCAAGGACT CCACCTACTC CCTGTCCTCC ACCCTGACCC TGTCCAAGGC CGACTACGAG
AAGCACAAGG TGTACGCCTG CGAGGTGACC CACCAGGGCC TGTCCTCCCC CGTGACCAAG TCCTTCAACC
GGGGCGAGTG CTGAGCGGCC GCCTCGAG
SEQ ID NO: 11
Bevacizumab cDNA (Heavy chain)
gctagcgcca ccatgggctg gtcctgcatc atcctgttcc tggtggccac cgccaccggc gtgcactccg
aggtgcagct ggtggagtcc ggcggcggcc tggtgcagcc cggcggctcc ctgcggctgt cctgcgccgc
ctccggctac accttcacca actacggcat gaactgggtg cggcaggccc ccggcaaggg cctggagtgg
gtgggctgga tcaacaccta caccggcgag cccacctacg ccgccgactt caagcggcgg ttcaccttct
ccctggacac ctccaagtcc accgcctacc tgcagatgaa ctccctgcgg gccgaggaca ccgccgtgta
ctactgcgcc aagtaccccc actactacgg ctcctcccac tggtacttcg acgtgtgggg ccagggcacc
ctggtgaccg tgtcctccgc ctccaccaag ggcccctccg tgttccccct ggccccctcc tccaagtcca
cctccggcgg caccgccgcc ctgggctgcc tggtgaagga ctacttcccc gagcccgtga ccgtgtcctg
gaactccggc gccctgacct ccggcgtgca caccttcccc gccgtgctgc agtcctccgg cctgtactcc
ctgtcctccg tggtgaccgt gccctcctcc tccctgggca cccagaccta catctgcaac gtgaaccaca
agccctccaa caccaaggtg gacaagaagg tggagcccaa gtcctgcgac aagacccaca cctgcccccc
ctgccccgcc cccgagctgc tgggcggccc ctccgtgttc ctgttccccc ccaagcccaa ggacaccctg
atgatctccc ggacccccga ggtgacctgc gtggtggtgg acgtgtccca cgaggacccc gaggtgaagt
tcaactggta cgtggacggc gtggaggtgc acaacgccaa gaccaagccc cgggaggagc agtacaactc
cacctaccgg gtggtgtccg tgctgaccgt gctgcaccag gactggctga acggcaagga gtacaagtgc
aaggtgtcca acaaggccct gcccgccccc atcgagaaga ccatctccaa ggccaagggc cagccccggg
agccccaggt gtacaccctg cccccctccc gggaggagat gaccaagaac caggtgtccc tgacctgcct
ggtgaagggc ttctacccct ccgacatcgc cgtggagtgg gagtccaacg gccagcccga gaacaactac
aagaccaccc cccccgtgct ggactccgac ggctccttct tcctgtactc caagctgacc gtggacaagt
cccggtggca gcagggcaac gtgttctcct gctccgtgat gcacgaggcc ctgcacaacc actacaccca
gaagtccctg tccctgtccc ccggcaagtg agcggccgcc
SEQ ID NO: 12
ranibizumab cDNA (Light chain comprising a signal sequence)
gagctccatg gagtttttca aaaagacggc acttgccgca ctggttatgg gttttagtgg tgcagcattg
gccgatatcc agctgaccca gagcccgagc agcctgagcg caagcgttgg tgatcgtgtt accattacct
gtagcgcaag ccaggatatt agcaattatc tgaattggta tcagcagaaa ccgggtaaag caccgaaagt
tctgatttat tttaccagca gcctgcatag cggtgttccg agccgtttta gcggtagcgg tagtggcacc
gattttaccc tgaccattag cagcctgcag ccggaagatt ttgcaaccta ttattgtcag cagtatagca
ccgttccgtg gacctttggt cagggcacca aagttgaaat taaacgtacc gttgcagcac cgagcgtttt
tatttttccg cctagtgatg aacagctgaa aagcggcacc gcaagcgttg tttgtctgct gaataatttt
tatccgcgtg aagcaaaagt gcagtggaaa gttgataatg cactgcagag cggtaatagc caagaaagcg
ttaccgaaca ggatagcaaa gatagcacct atagcctgag
cagcaccctg accctgagca aagcagatta tgaaaaacac aaagtgtatg cctgcgaagt tacccatcag
ggtctgagca gtccggttac caaaagtttt aatcgtggcg aatgctaata gaagcttggt
SEQ ID NO: 13
ranibizumab cDNA (Heavy chain comprising a signal sequence)
gagctcatat gaaatacctg ctgccgaccg ctgctgctgg tctgctgctc ctcgctgccc agccggcgat
ggccgaagtt cagctggttg aaagcggtgg tggtctggtt cagcctggtg gtagcctgcg tctgagctgt
gcagcaagcg gttatgattt tacccattat ggtatgaatt gggttcgtca ggcaccgggt aaaggtctgg
aatgggttgg ttggattaat acctataccg gtgaaccgac ctatgcagca gattttaaac gtcgttttac
ctttagcctg gataccagca
aaagcaccgc atatctgcag atgaatagcc tgcgtgcaga agataccgca gtttattatt gtgccaaata
tccgtattac tatggcacca gccactggta tttcgatgtt tggggtcagg gcaccctggt taccgttagc
agcgcaagca ccaaaggtcc gagcgttttt ccgctggcac cgagcagcaa aagtaccagc ggtggcacag
cagcactggg ttgtctggtt aaagattatt ttccggaacc ggttaccgtg agctggaata gcggtgcact
gaccagcggt gttcatacct
ttccggcagt tctgcagagc agcggtctgt atagcctgag cagcgttgtt accgttccga gcagcagcct
gggcacccag acctatattt gtaatgttaa tcataaaccg agcaatacca aagtggataa aaaagttgag
ccgaaaagct gcgataaaac ccatctgtaa tagggtacc
SEQ ID NO: 14
Bevacizumab and Ranibizumab Light Chain CDR1
SASQDISNYLN
SEQ ID NO: 15
Bevacizumab and Ranibizumab Light Chain CDR2
FTSSLHS
SEQ ID NO: 16
Bevacizumab and Ranibizumab Light Chain CDR3
QQYSTVPWT
SEQ ID NO: 17
bevacizumab Heavy Chain CDR1
GYTFTNYGMN
SEQ ID NO: 18
Bevacizumab and Ranibizumab Heavy Chain CDR2
WINTYTGEPTYAADFKR
SEQ ID NO: 19
Bevacizumab Heavy Chain CDR3
YPHYYGSSHWYFDV
SEQ ID NO: 20
ranibizumab Heavy Chain CDR1
GYDFTHYGMN
SEQ ID NO: 21
ranibizumab Heavy Chain CDR1
YPYYYGTSHWYFDV
SEQ ID NO: 22
Albumin signal peptide
MKWVTFISLLFLFSSAYS
SEQ ID NO: 23
Chymotrypsinogen signal peptide
MAFLWLLSCWALLGTTFG
SEQ ID NO: 24
Interleukin-2 signal peptide
MYRMQLLSCIALILALVTNS
SEQ ID NO: 25
Trypsinogen-2 signal peptide
MNLLLILTFVAAAVA
SEQ ID NO: 26
F2A site
LLNFDLLKLAGDVESNPGP
SEQ ID NO: 27
T2A site
(GSG)EGRGSLLTCGDVEENPGP
SEQ ID NO: 28
P2A site
(GSG)ATNFSLLKQAGDVEENPGP
SEQ ID NO: 29
E2A site
(GSG)QCTNYALLKLAGDVESNPGP
SEQ ID NO: 30
F2A site
(GSG)VKQTLNFDLLKLAGDVESNPGP
SEQ ID NO: 31
Furin linker
RKRR
SEQ ID NO: 32
Furin linker
RRRR
SEQ ID NO: 33
Furin linker
RRKR
SEQ ID NO: 34
Furin linker
RKKR
SEQ ID NO: 35
Furin linker
R-X-K/R-R
SEQ ID NO: 36
Furin linker
RXKR
SEQ ID NO: 37
Furin linker
RXRR
SEQ ID NO: 38
Ranibizumab Fab amino acid sequence (Light chain)
MDIQLTQSPSSLSASVGDRVTITCSASQDISNYLNWYQQKPGKAPKVLIYFTSSLHSGVPSRFSGSGSGTDFTLTIS
SLQPEDFATYYCQQYSTVPWTFGQGTKVEIKRTVAAPSVFIFPPSDEQLKSGTASVVCLLNNFYPREAKVQWKVDNA
LQSGNSQESVTEQDSKDSTYSLSSTLTLSKADYEKHKVYACEVTHQGLSSPVTKSFNRGEC
SEQ ID NO: 39
Ranibizumab Fab amino acid sequence (Heavy chain)
MEVQLVESGGGLVQPGGSLRLSCAASGYDFTHYGMNWVRQAPGKGLEWVGWINTYTGEPTYAADFKRRFTFSLDTSK
STAYLQMNSLRAEDTAVYYCAKYPYYYGTSHWYFDVWGQGTLVTVSSASTKGPSVFPLAPSSKSTSGGTAALGCLVK
DYFPEPVTVSWNSGALTSGVHTFPAVLQSSGLYSLSSVVTVPSSSLGTQTYICNVNHKPSNTKVDKKVEPKSCDKTH
LRKRR
SEQ ID NO: 40
Ranibizumab Fab amino acid sequence (Heavy chain)
MEVQLVESGGGLVQPGGSLRLSCAASGYDFTHYGMNWVRQAPGKGLEWVGWINTYTGEPTYAADFKRRFTFSLDTSK
STAYLQMNSLRAEDTAVYYCAKYPYYYGTSHWYFDVWGQGTLVTVSSASTKGPSVFPLAPSSKSTSGGTAALGCLVK
DYFPEPVTVSWNSGALTSGVHTFPAVLQSSGLYSLSSVVTVPSSSLGTQTYICNVNHKPSNTKVDKKVEPKSCDKTH
L
SEQ ID NO: 41
AAV1
MAADGYLPDWLEDNLSEGIREWWDLKPGAPKPKANQQKQDDGRGLVLPGYKYLGPFNGLDKGEPVNAADAAALEHDK
AYDQQLKAGDNPYLRYNHADAEFQERLQEDTSFGGNLGRAVFQAKKRVLEPLGLVEEGAKTAPGKKRPVEQSPQEPD
SSSGIGKTGQQPAKKRLNFGQTGDSESVPDPQPLGEPPATPAAVGPTTMASGGGAPMADNNEGADGVGNASGNWHCD
STWLGDRVITTSTRTWALPTYNNHLYKQISSASTGASNDNHYFGYSTPWGYFDFNRFHCHFSPRDWQRLINNNWGFR
PKRLNFKLFNIQVKEVTTNDGVTTIANNLTSTVQVFSDSEYQLPYVLGSAHQGCLPPFPADVFMIPQYGYLTLNNGS
QAVGRSSFYCLEYFPSQMLRTGNNFTFSYTFEEVPFHSSYAHSQSLDRLMNPLIDQYLYYLNRTQNQSGSAQNKDLL
FSRGSPAGMSVQPKNWLPGPCYRQQRVSKTKTDNNNSNFTWTGASKYNLNGRESIINPGTAMASHKDDEDKFFPMSG
VMIFGKESAGASNTALDNVMITDEEEIKATNPVATERFGTVAVNFQSSSTDPATGDVHAMGALPGMVWQDRDVYLQG
PIWAKIPHTDGHFHPSPLMGGFGLKNPPPQILIKNTPVPANPPAEFSATKFASFITQYSTGQVSVEIEWELQKENSK
RWNPEVQYTSNYAKSANVDFTVDNNGLYTEPRPIGTRYLTRPL
SEQ ID NO: 42
AAV2
[sequence omitted]
SEQ ID NO: 43
AAV3-3
MAADGYLPDWLEDNLSEGIREWWALKPGVPQPKANQQHQDNRRGLVLPGYKYLGPGNGLDKGEPVNEADAAALEHDK
AYDQQLKAGDNPYLKYNHADAEFQERLQEDTSFGGNLGRAVFQAKKRILEPLGLVEEAAKTAPGKKGAVDQSPQEPD
SSSGVGKSGKQPARKRLNFGQTGDSESVPDPQPLGEPPAAPTSLGSNTMASGGGAPMADNNEGADGVGNSSGNWHCD
SQWLGDRVITTSTRTWALPTYNNHLYKQISSQSGASNDNHYFGYSTPWGYFDFNRFHCHFSPRDWQRLINNNWGFRP
KKLSFKLFNIQVRGVTQNDGTTTIANNLTSTVQVFTDSEYQLPYVLGSAHQGCLPPFPADVFMVPQYGYLTLNNGSQ
AVGRSSFYCLEYFPSQMLRTGNNFQFSYTFEDVPFHSSYAHSQSLDRLMNPLIDQYLYYLNRTQGTTSGTTNQSRLL
FSQAGPQSMSLQARNWLPGPCYRQQRLSKTANDNNNSNFPWTAASKYHLNGRDSLVNPGPAMASHKDDEEKFFPMHG
NLIFGKEGTTASNAELDNVMITDEEEIRTTNPVATEQYGTVANNLQSSNTAPTTGTVNHQGALPGMVWQDRDVYLQG
PIWAKIPHTDGHFHPSPLMGGFGLKHPPPQIMIKNTPVPANPPTTFSPAKFASFITQYSTGQVSVEIEWELQKENSK
RWNPEIQYTSNYNKSVNVDFTVDTNGVYSEPRPIGTRYLTRNL
SEQ ID NO: 44
AAV4-4
MTDGYLPDWLEDNLSEGVREWWALQPGAPKPKANQQHQDNARGLVLPGYKYLGPGNGLDKGEPVNAADAAALEHDKA
YDQQLKAGDNPYLKYNHADAEFQQRLQGDTSEGGNLGRAVFQAKKRVLEPLGLVEQAGETAPGKKRPLIESPQQPDS
STGIGKKGKQPAKKKLVFEDETGAGDGPPEGSTSGAMSDDSEMRAAAGGAAVEGGQGADGVGNASGDWHCDSTWSEG
HVTTTSTRTWVLPTYNNHLYKRLGESLQSNTYNGFSTPWGYFDENRFHCHFSPRDWQRLINNNWGMRPKAMRVKIFN
IQVKEVTTSNGETTVANNLTSTVQIFADSSYELPYVMDAGQEGSLPPFPNDVFMVPQYGYCGLVTGNTSQQQTDRNA
FYCLEYFPSQMLRTGNNFEITYSFEKVPFHSMYAHSQSLDRLMNPLIDQYLWGLQSTTTGTTLNAGTATTNFTKLRP
TNFSNFKKNWLPGPSIKQQGFSKTANQNYKIPATGSDSLIKYETHSTLDGRWSALTPGPPMATAGPADSKFSNSQLI
FAGPKQNGNTATVPGTLIFTSEEELAATNATDTDMWGNLPGGDQSNSNLPTVDRLTALGAVPGMVWQNRDIYYQGPI
WAKIPHTDGHFHPSPLIGGFGLKHPPPQIFIKNTPVPANPATTFSSTPVNSFITQYSTGQVSVQIDWEIQKERSKRW
NPEVQFTSNYGQQNSLLWAPDAAGKYTEPRAIGTRYLTHHL
SEQ ID NO: 45
AAV5
MSFVDHPPDWLEEVGEGLREFLGLEAGPPKPKPNQQHQDQARGLVLPGYNYLGPGNGLDRGEPVNRADEVAREHDIS
YNEQLEAGDNPYLKYNHADAEFQEKLADDTSFGGNLGKAVFQAKKRVLEPFGLVEEGAKTAPTGKRIDDHFPKRKKA
RTEEDSKPSTSSDAEAGPSGSQQLQIPAQPASSLGADTMSAGGGGPLGDNNQGADGVGNASGDWHCDSTWMGDRVVT
KSTRTWVLPSYNNHQYREIKSGSVDGSNANAYFGYSTPWGYFDFNRFHSHWSPRDWQRLINNYWGFRPRSLRVKIFN
IQVKEVTVQDSTTTIANNLTSTVQVFTDDDYQLPYVVGNGTEGCLPAFPPQVFTLPQYGYATLNRDNTENPTERSSF
FCLEYFPSKMLRTGNNFEFTYNFEEVPFHSSFAPSQNLFKLANPLVDQYLYRFVSTNNTGGVQFNKNLAGRYANTYK
NWFPGPMGRTQGWNLGSGVNRASVSAFATTNRMELEGASYQVPPQPNGMTNNLQGSNTYALENTMIFNSQPANPGTT
ATYLEGNMLITSESETQPVNRVAYNVGGQMATNNQSSTTAPATGTYNLQEIVPGSVWMERDVYLQGPIWAKIPETGA
HFHPSPAMGGFGLKHPPPMMLIKNTPVPGNITSFSDVPVSSFITQYSTGQVTVEMEWELKKENSKRWNPEIQYTNNY
NDPQFVDFAPDSTGEYRTTRPIGTRYLTRPL
SEQ ID NO: 46
AAV6
MAADGYLPDWLEDNLSEGIREWWDLKPGAPKPKANQQKQDDGRGLVLPGYKYLGPFNGLDKGEPVNAADAAALEHDK
AYDQQLKAGDNPYLRYNHADAEFQERLQEDTSFGGNLGRAVFQAKKRVLEPFGLVEEGAKTAPGKKRPVEQSPQEPD
SSSGIGKTGQQPAKKRLNFGQTGDSESVPDPQPLGEPPATPAAVGPTTMASGGGAPMADNNEGADGVGNASGNWHCD
STWLGDRVITTSTRTWALPTYNNHLYKQISSASTGASNDNHYFGYSTPWGYFDFNRFHCHFSPRDWQRLINNNWGFR
PKRLNFKLFNIQVKEVTTNDGVTTIANNLTSTVQVFSDSEYQLPYVLGSAHQGCLPPFPADVFMIPQYGYLTLNNGS
QAVGRSSFYCLEYFPSQMLRTGNNFTFSYTFEDVPFHSSYAHSQSLDRLMNPLIDQYLYYLNRTQNQSGSAQNKDLL
FSRGSPAGMSVQPKNWLPGPCYRQQRVSKTKTDNNNSNFTWTGASKYNLNGRESIINPGTAMASHKDDKDKFFPMSG
VMIFGKESAGASNTALDNVMITDEEEIKATNPVATERFGTVAVNLQSSSTDPATGDVHVMGALPGMVWQDRDVYLQG
PIWAKIPHTDGHFHPSPLMGGFGLKHPPPQILIKNTPVPANPPAEFSATKFASFITQYSTGQVSVEIEWELQKENSK
RWNPEVQYTSNYAKSANVDFTVDNNGLYTEPRPIGTRYLTRPL
SEQ ID NO: 47
AAV7
MAADGYLPDWLEDNLSEGIREWWDLKPGAPKPKANQQKQDNGRGLVLPGYKYLGPFNGLDKGEPVNAADAAALEHDK
AYDQQLKAGDNPYLRYNHADAEFQERLQEDTSFGGNLGRAVFQAKKRVLEPLGLVEEGAKTAPAKKRPVEPSPQRSP
DSSTGIGKKGQQPARKRLNFGQTGDSESVPDPQPLGEPPAAPSSVGSGTVAAGGGAPMADNNEGADGVGNASGNWHC
DSTWLGDRVITTSTRTWALPTYNNHLYKQISSETAGSTNDNTYFGYSTPWGYFDFNRFHCHFSPRDWQRLINNNWGF
RPKKLRFKLFNIQVKEVTTNDGVTTIANNLTSTIQVFSDSEYQLPYVLGSAHQGCLPPFPADVFMIPQYGYLTLNNG
SQSVGRSSFYCLEYFPSQMLRTGNNFEFSYSFEDVPFHSSYAHSQSLDRLMNPLIDQYLYYLARTQSNPGGTAGNRE
LQFYQGGPSTMAEQAKNWLPGPCFRQQRVSKTLDQNNNSNFAWTGATKYHLNGRNSLVNPGVAMATHKDDEDRFFPS
SGVLIFGKTGATNKTTLENVLMTNEEEIRPTNPVATEEYGIVSSNLQAANTAAQTQVVNNQGALPGMVWQNRDVYLQ
GPIWAKIPHTDGNFHPSPLMGGFGLKHPPPQILIKNTPVPANPPEVFTPAKFASFITQYSTGQVSVEIEWELQKENS
KRWNPEIQYTSNFEKQTGVDFAVDSQGVYSEPRPIGTRYLTRNL
SEQ ID NO: 48
AAV8
MAADGYLPDWLEDNLSEGIREWWALKPGAPKPKANQQKQDDGRGLVLPGYKYLGPFNGLDKGEPVNAADAAALEHDK
AYDQQLQAGDNPYLRYNHADAEFQERLQEDTSFGGNLGRAVFQAKKRVLEPLGLVEEGAKTAPGKKRPVEPSPQRSP
DSSTGIGKKGQQPARKRLNFGQTGDSESVPDPQPLGEPPAAPSGVGPNTMAAGGGAPMADNNEGADGVGSSSGNWHC
DSTWLGDRVITTSTRTWALPTYNNHLYKQISNGTSGGATNDNTYFGYSTPWGYFDFNRFHCHFSPRDWQRLINNNWG
FRPKRLSFKLFNIQVKEVTQNEGTKTIANNLTSTIQVFTDSEYQLPYVLGSAHQGCLPPFPADVFMIPQYGYLTLNN
GSQAVGRSSFYCLEYFPSQMLRTGNNFQFTYTFEDVPFHSSYAHSQSLDRLMNPLIDQYLYYLSRTQTTGGTANTQT
LGFSQGGPNTMANQAKNWLPGPCYRQQRVSTTTGQNNNSNFAWTAGTKYHLNGRNSLANPGIAMATHKDDEERFFPS
NGILIFGKQNAARDNADYSDVMLTSEEEIKTTNPVATEEYGIVADNLQQQNTAPQIGTVNSQGALPGMVWQNRDVYL
QGPIWAKIPHTDGNFHPSPLMGGFGLKHPPPQILIKNTPVPADPPTTFNQSKLNSFITQYSTGQVSVEIEWELQKEN
SKRWNPEIQYTSNYYKSTSVDFAVNTEGVYSEPRPIGTRYLTRNL
SEQ ID NO: 49
hu31
MAADGYLPDWLEDTLSEGIRQWWKLKPGPPPPKPAERHKDDSRGLVLPGYKYLGPGNGLDKGEPVNAADAAALEHDK
AYDQQLKAGDNPYLKYNHADAEFQERLKEDTSFGGNLGRAVFQAKKRLLEPLGLVEEAAKTAPGKKRPVEQSPQEPD
SSAGIGKSGSQPAKKKLNFGQTGDTESVPDPQPIGEPPAAPSGVGSLTMASGGGAPVADNNEGADGVGSSSGNWHCD
SQWLGDRVITTSTRTWALPTYNNHLYKQISNSTSGGSSNDNAYFGYSTPWGYFDFNRFHCHFSPRDWQRLINNNWGF
RPKRLNFKLFNIQVKEVTDNNGVKTIANNLTSTVQVFTDSDYQLPYVLGSAHEGCLPPFPADVFMIPQYGYLTLNDG
GQAVGRSSFYCLEYFPSQMLRTGNNFQFSYEFENVPFHSSYAHSQSLDRLMNPLIDQYLYYLSKTINGSGQNQQTLK
FSVAGPSNMAVQGRNYIPGPSYRQQRVSTTVTQNNNSEFAWPGASSWALNGRNSLMNPGPAMASHKEGEDRFFPLSG
SLIFGKQGTGRDNVDADKVMITNEEEIKTTNPVATESYGQVATNHQSAQAQAQTGWVQNQGILPGMVWQDRDVYLQG
PIWAKIPHTDGNFHPSPLMGGFGMKHPPPQILIKNTPVPADPPTAFNKDKLNSFITQYSTGQVSVEIEWELQKENSK
RWNPEIQYTSNYYKSNNVEFAVSTEGVYSEPRPIGTRYLTRNL
SEQ ID NO: 50
hu32
MAADGYLPDWLEDTLSEGIRQWWKLKPGPPPPKPAERHKDDSRGLVLPGYKYLGPGNGLDKGEPVNAADAAALEHDK
AYDQQLKAGDNPYLKYNHADAEFQERLKEDTSFGGNLGRAVFQAKKRLLEPLGLVEEAAKTAPGKKRPVEQSPQEPD
SSAGIGKSGSQPAKKKLNFGQTGDTESVPDPQPIGEPPAAPSGVGSLTMASGGGAPVADNNEGADGVGSSSGNWHCD
SQWLGDRVITTSTRTWALPTYNNHLYKQISNSTSGGSSNDNAYFGYSTPWGYFDFNRFHCHFSPRDWQRLINNNWGF
RPKRLNFKLFNIQVKEVTDNNGVKTIANNLTSTVQVFTDSDYQLPYVLGSAHEGCLPPFPADVFMIPQYGYLTLNDG
SQAVGRSSFYCLEYFPSQMLRTGNNFQFSYEFENVPFHSSYAHSQSLDRLMNPLIDQYLYYLSKTINGSGQNQQTLK
FSVAGPSNMAVQGRNYIPGPSYRQQRVSTTVTQNNNSEFAWPGASSWALNGRNSLMNPGPAMASHKEGEDRFFPLSG
SLIFGKQGTGRDNVDADKVMITNEEEIKTTNPVATESYGQVATNHQSAQAQAQTGWVQNQGILPGMVWQDRDVYLQG
PIWAKIPHTDGNFHPSPLMGGFGMKHPPPQILIKNTPVPADPPTAFNKDKLNSFITQYSTGQVSVEIEWELQKENSK
RWNPEIQYTSNYYKSNNVEFAVNTEGVYSEPRPIGTRYLTRNL
SEQ ID NO: 51
AAV9
MAADGYLPDWLEDNLSEGIREWWALKPGAPQPKANQQHQDNARGLVLPGYKYLGPGNGLDKGEPVNAADAAALEHDK
AYDQQLKAGDNPYLKYNHADAEFQERLKEDTSFGGNLGRAVFQAKKRLLEPLGLVEEAAKTAPGKKRPVEQSPQEPD
SSAGIGKSGAQPAKKRLNFGQTGDTESVPDPQPIGEPPAAPSGVGSLTMASGGGAPVADNNEGADGVGSSSGNWHCD
SQWLGDRVITTSTRTWALPTYNNHLYKQISNSTSGGSSNDNAYFGYSTPWGYFDFNRFHCHFSPRDWQRLINNNWGF
RPKRLNFKLFNIQVKEVTDNNGVKTIANNLTSTVQVFTDSDYQLPYVLGSAHEGCLPPFPADVFMIPQYGYLTLNDG
SQAVGRSSFYCLEYFPSQMLRTGNNFQFSYEFENVPFHSSYAHSQSLDRLMNPLIDQYLYYLSKTINGSGQNQQTLK
FSVAGPSNMAVQGRNYIPGPSYRQQRVSTTVTQNNNSEFAWPGASSWALNGRNSLMNPGPAMASHKEGEDRFFPLSG
SLIFGKQGTGRDNVDADKVMITNEEEIKTTNPVATESYGQVATNHQSAQAQAQTGWVQNQGILPGMVWQDRDVYLQG
PIWAKIPHTDGNFHPSPLMGGFGMKHPPPQILIKNTPVPADPPTAFNKDKLNSFITQYSTGQVSVEIEWELQKENSK
RWNPEIQYTSNYYKSNNVEFAVNTEGVYSEPRPIGTRYLTRNL
SEQ ID NO: 52
SPERMATOGENESIS ASSOCIATED 7 (SPATA7);
AAH90875.1

| | |
|---|---|
| 1 | MDGSRRVRAT SVLPRYGPPC LFKGHLSTKS NAAVDCSVPV SVSTSIKYAD QQRREKLKKE |
| 61 | LAQCEKEFKL TKTAMRANYK NNSKSLFNTL QKPSGEPQIE DDMLKEEMNG FSSFARSLVP |
| 121 | SSERLHLSLH KSSKVITNGP EKNSSSSPSS VDYAASGPRK LSSGALYGRR PRSTFPNSHR |
| 181 | FQLVISKAPS GDLLDKHSEL FSNKQLPFTP RTLKTEAKSF LSQYRYYTPA KRKKDFTDQR |
| 241 | IEAETQTELS FKSELGTAET KNMTDSEMNI KQASNCVTYD AKEKIAPLPL EGHDSTWDEI |
| 301 | KDDALQHSSP RAMCQYSLKP PSTRKIYSDE EELLYLSFIE DVTDEILKLG LFSNRFLERL |
| 361 | FERHIKQNKH LEEEKMRHLL HVLKVDLGCT SEENSVKQND VDMLNVFDFE KAGNSEPNEL |
| 421 | KNESEVTIQQ ERQQYQKALD MLLSAPKDEN EIFPSPTEFF MPIYKSKHSE GVIIQQVNDE |
| 481 | TNLETSTLDE NHPSISDSLT DRETSVNVIE GDSDPEKVEI SNGLCGLNTS PSQSVQFSSV |
| 541 | KGDNNHDMEL STLKIMEMSI EDCPLDV |

SEQ ID NO: 53
LEBERCILIN (LCA5)
NP_001116241.1

| | |
|---|---|
| 1 | MGERAGSPGT DQERKAGKHH YSYLSDFETP QSSGRSSLVS SSPASVRRKN PKRQTSDGQV |
| 61 | HHQAPRKPSP KGLPNRKGVR VGFRSQSLNR EPLRKDTDLV TKRILSARLL KINELQNEVS |
| 121 | ELQVKLAELL KENKSLKRLQ YRQEKALNKF EDAENEISQL IFRHNNEITA LKERLRKSQE |
| 181 | KERATEKRVK DTESELFRTK FSLQKLKEIS EARHLPERDD LAKKLVSAEL KLDDTERRIK |
| 241 | ELSKNLELST NSFQRQLLAE RKRAYEAHDE NKVLQKEVQR LYHKLKEKER ELDIKNIYSN |
| 301 | RLPKSSPNKE KELALRKNAA CQSDFADLCT KGVQTMEDFK PEEYPLTPET IMCYENKWEE |
| 361 | PGHLTLDLQS QKQDRHGEAG ILNPIMEREE KFVTDEELHV VKQEVEKLED EWEREELDKK |
| 421 | QKEKASLLER EEKPEWETGR YQLGMYPIQN MDKLQGEEEE RLKREMLLAK LNEIDRELQD |
| 481 | SRNLKYPVLP LLPDFESKLH SPERSPKTYR FSESSERLFN GHHLQDISFS TPKGEGQNSG |
| 541 | NVRSPASPNE FAFGSYVPSF AKTSERSNPF SQKSSFLDFQ RNSMEKLSKD GVDLITRKEK |
| 601 | KANLMEQLFG ASGSSTISSK SSDPNSVASS KGDIDPLNFL PGNKGSRDQE HDEDEGFFLS |
| 661 | EGRSFNPNRH RLKHADDKPA VKAADSVEDE IEEVALR |

SEQ ID NO: 54
RPGR INTERACTING PROTEIN 1 (RPGRIP1)
CAD01135.1

| | |
|---|---|
| 1 | MSHLVDPTSG DLPVRDIDAI PLVLPASKGK NMKTQPPLSR MNREELEDSF FRLREDHMLV |
| 61 | KELSWKQQDE IKRLRTTLLR LTAAGRDLRV AEEAAPLSET ARRGQKAGWR QRLSMHQRPQ |
| 121 | MHRLQGHFHC VGPASPRRAQ PRVQVGHRQL HTAGAPVPEK PKRGPRDRLS YTAPPSFKEH |
| 181 | ATNENRGEVA SKPSELVSGS NSIISFSSVI SMAKPIGLCM PNSAHIMASN TMQVEEPPKS |
| 241 | PEKMWPKDEN FEQRSSLECA QKAAELRASI KEKVELIRLK KLLHERNASL VMTKAQLTEV |
| 301 | QEAYETLLQK NQGILSAAHE ALLKQVNELR AELKEESKKA VSLKSQLEDV SILQMTLKEF |
| 361 | QERVEDLEKE RKLLNDNYDK LLESMLDSSD SSSQPHWSNE LIAEQLQQQV SQLQDQLDAE |
| 421 | LEDKRKVLLE LSREKAQNED LKLEVTNILQ KHKQEVELLQ NAATISQPPD RQSEPATHPA |
| 481 | VLQENTQIEP SEPKNQEEKK LSQVLNELQV SHAETTLELE KTRDMLILQR KINVCYQEEL |
| 541 | EAMMTKADND NRDHKEKLER LTRLLDLKNN RIKQLEGILR SHDLPTSEQL KDVAYGTRPL |
| 601 | SLCLETLPAH GDEDKVDISL LHQGENLFEL HIHQAFLTSA ALAQAGDTQP TTFCTYSFYD |
| 661 | FETHCTPLSV GPQPLYDFTS QYVMETDSLF LHYLQEASAR LDIHQAMASE HSTLAAGWIC |
| 721 | FDRVLETVEK VHGLATLIGA GGEEFGVLEY WMRLRFPIKP SLQACNKRKK AQVYLSTDVL |
| 781 | GGRKAQEEEF RSESWEPQNE LWIEITKCCG LRSRWLGTQP SPYAVYRFFT FSDHDTAIIP |
| 841 | ASNNPYFRDQ ARFPVLVTSD LDHYLRREAL SIHVFDDEDL EPGSYLGRAR VPLLPLAKNE |
| 901 | SIKGDFNLTD PAEKPNGSIQ VQLDWKFPYI PPESFLKPEA QTKGKDTKDS SKISSEEEKA |
| 961 | SFPSQDQMAS PEVPIEAGQY RSKRKPPHGG ERKEKEHQVV SYSRRKHGKR IGVQGKNRME |
| 1021 | YLSLNILNGN TPQQVNYTEW KFSETNSFIG DGFKNQHEEE EMTLSHSALK QKEPLHPVND |
| 1081 | KESSEQGSEV SEAQTTDSDD VIVPPMSQKY PKADSEKMCI EIVSLAFYPE AEVMSDENIK |
| 1141 | QVYVEYKFYD LPLSETETPV SLRKPRAGEE IHFHFSKVID LDPQEQQGRR RFLFDMLNGQ |
| 1201 | DPDQGHLKFT VVSDPLDEEK KECEEVGYAY LQLWQILESG RDILEQELDI VSPEDLATPI |
| 1261 | GRLKVSLQAA AVLHAIYKEM TEDLFS |

SEQ ID NO: 55
CONE-ROD HOMEOBOX (CRX)
EAW57515.1

| | |
|---|---|
| 1 | MMAYMNPGPH YSVNALALSG PSVDLMHQAV PYPSAPRKQR RERTTFTRSQ LEELEALFAK |
| 61 | TQYPDVYARE EVALKINLPE SRVQVWFKNR RAKCRQQRQQ QKQQQQPPGG QAKARPAKRK |
| 121 | AGTSPRPSTD VCPDPLGISD SYSPPLPGPS GSPTTAVATV SIWSPASESP LPEAQRAGLV |
| 181 | ASGPSLTSAP YAMTYAPASA FCSSPSAYGS PSSYFSGLDP YLSPMVPQLG GPALSPLSGP |
| 241 | SVGPSLAQSP TSLSGQSYGA YSPVDSLEFK DPTGTWKFTY NPMDPLDYKD QSAWKFQIL |

SEQ ID NO: 56
CRUMBS CELL POLARITY COMPLEX COMPONENT 1 (CRB1), HOMOLOG 1 ISOFORM 1
PRECURSOR
NP_957705.1

| | |
|---|---|
| 1 | MALKNINYLL IFYLSFSLLI YIKNSFCNKN NTRCLSNSCQ NNSTCKDFSK DNDCSCSDTA |
| 61 | NNLDKDCDNM KDPCFSNPCQ GSATCVNTPG ERSFLCKCPP GYSGTICETT IGSCGKNSCQ |
| 121 | HGGICHQDPI YPVCICPAGY AGRFCEIDHD ECASSPCQNG AVCQDGIDGY SCFCVPGYQG |
| 181 | RHCDLEVDEC ASDPCKNEAT CLNEIGRYTC ICPHNYSGVN CELEIDECWS QPCLNGATCQ |
| 241 | DALGAYFCDC APGFLGDHCE LNTDECASQP CLHGGLCVDG ENRYSCNCTG SGFTGTHCET |
| 301 | LMPLCWSKPC HNNATCEDSV DNYTCHCWPG YTGAQCEIDL NECNSNPCQS NGECVELSSE |
| 361 | KQYGRITGLP SSFSYHEASG YVCICQPGFT GIHCEEDVNE CSSNPCQNGG TCENLPGNYT |
| 421 | CHCPFDNLSR TFYGGRDCSD ILLGCTHQQC LNNGTCIPHF QDGQHGFSCL CPSGYTGSLC |
| 481 | EIATTLSFEG DGFLWVKSGS VTTKGSVCNI ALRFQTVQPM ALLLFRSNRD VFVKLELLSG |
| 541 | YIHLSIQVNN QSKVLLFISH NTSDGEWHFV EVIFAEAVTL TLIDDSCKEK CIAKAPTPLE |
| 601 | SDQSICAFQN SFLGGLPVGM TSNGVALLNF YNMPSTPSFV GCLQDIKIDW NHITLENISS |
| 661 | GSSLNVKAGC VRKDWCESQP CQSRGRCINL WLSYQCDCHR PYEGPNCLRE YVAGRFGQDD |
| 721 | STGYVIFTLD ESYGDTISLS MFVRTLQPSG LLLALENSTY QYIRVWLERG RLAMLTPNSP |
| 781 | KLVVKFVLND GNVHLISLKI KPYKIELYQS SQNLGFISAS TWKIEKGDVI YIGGLPDKQE |
| 841 | TELNGGFFKG CIQDVRLNNQ NLEFFPNPTN NASLNPVLVN VTQGCAGDNS CKSNPCHNGG |
| 901 | VCHSRWDDFS CSCPALTSGK ACEEVQWCGF SPCPHGAQCQ PVLQGFECIA NAVFNGQSGQ |
| 961 | ILFRSNGNIT RELTNITFGF RTRDANVIIL HAEKEPEFLN ISIQDSRLFF QLQSGNSFYM |
| 1021 | LSLTSLQSVN DGTWHEVTLS MTDPLSQTSR WQMEVDNETP FVTSTIATGS LNFLKDNTDI |
| 1081 | YVGDRAIDNI KGLQGCLSTI EIGGIYLSYF ENVHGFINKP QEEQFLKIST NSVVTGCLQL |
| 1141 | NVCNSNPCLH GGNCEDIYSS YHCSCPLGWS GKHCELNIDE CFSNPCIHGN CSDRVAAYHC |
| 1201 | TCEPGYTGVN CEVDIDNCQS HQCANGATCI SHTNGYSCLC FGNFTGKFCR QSRLPSTVCG |
| 1261 | NEKTNLTCYN GGNCTEFQTE LKCMCRPGFT GEWCEKDIDE CASDPCVNGG LCQDLLNKFQ |
| 1321 | CLCDVAFAGE RCEVDLADDL ISDIFTTIGS VTVALLLILL LAIVASVVTS NKRATQGTYS |
| 1381 | PSRQEKEGSR VEMWNLMPPP AMERLI |

SEQ ID NO: 57
CRUMBS CELL POLARITY COMPLEX COMPONENT 1 (CRB1), HOMOLOG 1 ISOFORM 2
PRECURSOR
NP_001180569.1

| | |
|---|---|
| 1 | MALKNINYLL IFYLSFSLLI YIKNSFCNKN NTRCLSNSCQ NNSTCKDFSK DNDCSCSDTA |
| 61 | NNLDKDCDNM KDPCFSNPCQ GSATCVNTPG ERSFLCKCPP GYSGTICETT IGSCGKNSCQ |
| 121 | HGGICHQDPI YPVCICPAGY AGRFCEIDHD ECASSPCQNG AVCQDGIDGY SCFCVPGYQG |
| 181 | RHCDLEVDEC ASDPCKNEAT CLNEIGRYTC ICPHNYSGYT GAQCEIDLNE CNSNPCQSNG |
| 241 | ECVELSSEKQ YGRITGLPSS FSYHEASGYV CICQPGFTGI HCEEDVNECS SNPCQNGGTC |
| 301 | ENLPGNYTCH CPFDNLSRTF YGGRDCSDIL LGCTHQQCLN NGTCIPHFQD GQHGFSCLCP |
| 361 | SGYTGSLCEI ATTLSFEGDG FLWVKSGSVT TKGSVCNIAL RFQTVQPMAL LLFRSNRDVF |
| 421 | VKLELLSGYI HLSIQVNNQS KVLLFISHNT SDGEWHFVEV IFAEAVTLTL IDDSCKEKCI |
| 481 | AKAPTPLESD QSICAFQNSF LGGLPVGMTS NGVALLNFYN MPSTPSFVGC LQDIKIDWNH |
| 541 | ITLENISSGS SLNVKAGCVR KDWCESQPCQ SRGRCINLWL SYQCDCHRPY EGPNCLREYV |
| 601 | AGRFGQDDST GYVIFTLDES YGDTISLSMF VRTLQPSGLL LALENSTYQY IRVWLERGRL |
| 661 | AMLTPNSPKL VVKFVLNDGN VHLISLKIKP YKIELYQSSQ NLGFISASTW KIEKGDVIYI |
| 721 | GGLPDKQETE LNGGFFKGCI QDVRLNNQNL EFFPNPTNNA SLNPVLVNVT QGCAGDNSCK |
| 781 | SNPCHNGGVC HSRWDDFSCS CPALTSGKAC EEVQWCGFSP CPHGAQCQPV LQGFECIANA |
| 841 | VFNGQSGQIL FRSNGNITRE LTNITFGFRT RDANVIILHA EKEPEFLNIS IQDSRLFFQL |
| 901 | QSGNSFYMLS LTSLQSVNDG TWHEVTLSMT DPLSQTSRWQ MEVDNETPFV TSTIATGSLN |
| 961 | FLKDNTDIYV GDRAIDNIKG LQGCLSTIEI GGIYLSYFEN VHGFINKPQE EQFLKISTNS |
| 1021 | VVTGCLQLNV CNSNPCLHGG NCEDIYSSYH CSCPLGWSGK HCELNIDECF SNPCIHGNCS |
| 1081 | DRVAAYHCTC EPGYTGVNCE VDIDNCQSHQ CANGATCISH TNGYSCLCFG NFTGKFCRQS |
| 1141 | RLPSTVCGNE KTNLTCYNGG NCTEFQTELK CMCRPGFTGE WCEKDIDECA SDPCVNGGLC |
| 1201 | QDLLNKFQCL CDVAFAGERC EVDLADDLIS DIFTTIGSVT VALLLILLLA IVASVVTSNK |
| 1261 | RATQGTYSPS RQEKEGSRVE MWNLMPPPAM ERLI |

SEQ ID NO: 58
NICOTINAMIDE NUCLEOTIDE ADENYLYLTRANSFERASE 1 (NMNAT1)
Q9HAN9.1

| | |
|---|---|
| 1 | MENSEKTEVV LLACGSFNPI TNMHLRLFEL AKDYMNGTGR YTVVKGIISP VGDAYKKKGL |
| 61 | IPAYHRVIMA ELATKNSKWV EVDTWESLQK EWKETLKVLR HHQEKLEASD CDHQQNSPTL |
| 121 | ERPGRKRKWT ETQDSSQKKS LEPKTKAVPK VKLLCGADLL ESFAVPNLWK SEDITQIVAN |
| 181 | YGLICVTRAG NDAQKFIYES DVLWKHRSNI HVVNEWIAND ISSTKIRRAL RRGQSIRYLV |
| 241 | PDLVQEYIEK HNLYSSESED RNAGVILAPL QRNTAEAKT |

SEQ ID NO: 59
NICOTINAMIDE NUCLEOTIDE ADENYLYLTRANSFERASE 1 (NMNAT1); ISOFORM CRA_A
EAW71635.1

| | |
|---|---|
| 1 | MENSEKTEVV LLACGSFNPI TNMHLRLFEL AKDYMNGTGR YTVVKGIISP VGDAYKKKGL |
| 61 | IPAYHRVIMA ELATKNSKWV EVDTWESLQK EWKETLKVLR HHQEKLEASD CDHQQNSPTL |
| 121 | ERPGRKRKWT ETQDSSQKKS LEPKTKAVPK VKLLCGADLL ESFAVPNLWK SEDITQIVAN |
| 181 | YGLICVTRAG NDAQKFIYES DVLWKHRSNI HVVNEWIAND ISSTKIRRAL RRGQSIRYLV |
| 241 | PDLVQEYIEK HNLYSSESED RNAGVILAPL QRNTAEAKT |

SEQ ID NO: 60
NICOTINAMIDE NUCLEOTIDE ADENYLYLTRANSFERASE 1 (NMNAT1), ISOFORM 2
NP_001284708.1

| | |
|---|---|
| 1 | MENSEKTEVV LLACGSFNPI TNMHLRLFEL AKDYMNGTGR YTVVKGIISP VGDAYKKKGL |
| 61 | IPAYHRVIMA ELATKNSKWV EVDTWESLQK EWKETLKVLR HHQEKLEASD CDHQQNSPTL |
| 121 | ERPGRKRKWT ETQDSSQKKS LEPKTKDGVS LYHPGWSAVA |

SEQ ID NO: 61
NICOTINAMIDE NUCLEOTIDE ADENYLYLTRANSFERASE 1 (NMNAT1), ISOFORM 1
NP_073624.2

| | |
|---|---|
| 1 | MENSEKTEVV LLACGSFNPI TNMHLRLFEL AKDYMNGTGR YTVVKGIISP VGDAYKKKGL |
| 61 | IPAYHRVIMA ELATKNSKWV EVDTWESLQK EWKETLKVLR HHQEKLEASD CDHQQNSPTL |
| 121 | ERPGRKRKWT ETQDSSQKKS LEPKTKAVPK VKLLCGADLL ESFAVPNLWK SEDITQIVAN |
| 181 | YGLICVTRAG NDAQKFIYES DVLWKHRSNI HVVNEWIAND ISSTKIRRAL RRGQSIRYLV |
| 241 | PDLVQEYIEK HNLYSSESED RNAGVILAPL QRNTAEAKT |

SEQ ID NO: 62
CENTROSOMAL PROTEIN 290 (CEP290);
NP_079390.3

| | |
|---|---|
| 1 | MPPNINWKEI MKVDPDDLPR QEELADNLLI SLSKVEVNEL KSEKQENVIH LFRITQSLMK |
| 61 | MKAQEVELAL EEVEKAGEEQ AKFENQLKTK VMKLENELEM AQQSAGGRDT RFLRNEICQL |
| 121 | EKQLEQKDRE LEDMEKELEK EKKVNEQLAL RNEEAENENS KLRRENKRLK KKNEQLCQDI |
| 181 | IDYQKQIDSQ KETLLSRRGE DSDYRSQLSK KNYELIQYLD EIQTLTEANE KIEVQNQEMR |
| 241 | KNLEESVQEM EKMTDEYNRM KAIVHQTDNV IDQLKKENDH YQLQVQELTD LLKSKNEEDD |
| 301 | PIMVAVNAKV EEWKLILSSK DDEIIEYQQM LHNLREKLKN AQLDADKSNV MALQQGIQER |
| 361 | DSQIKMLTEQ VEQYTKEMEK NTCIIEDLKN ELQRNKGAST LSQQTHMKIQ STLDILKEKT |
| 421 | KEAERTAELA EADAREKDKE LVEALKRLKD YESGVYGLED AVVEIKNCKN QIKIRDREIE |
| 481 | ILTKEINKLE LKISDFLDEN EALRERVGLE PKTMIDLTEF RNSKHLKQQQ YRAENQILLK |
| 541 | EIESLEEERL DLKKKIRQMA QERGKRSATS GLTTEDLNLT ENISQGDRIS ERKLDLLSLK |
| 601 | NMSEAQSKNE FLSRELIEKE RDLERSRTVI AKFQNKLKEL VEENKQLEEG MKEILQAIKE |
| 661 | MQKDPDVKGG ETSLIIPSLE RLVNAIESKN AEGIFDASLH LKAQVDQLTG RNEELRQELR |
| 721 | ESRKEAINYS QQLAKANLKI DHLEKETSLL RQSEGSNVVF KGIDLPDGIA PSSASIINSQ |
| 781 | NEYLIHLLQE LENKEKKLKN LEDSLEDYNR KFAVIRHQQS LLYKEYLSEK ETWKTESKTI |
| 841 | KEEKRKLEDQ VQQDAIKVKE YNNLLNALQM DSDEMKKILA ENSRKITVLQ VNEKSLIRQY |
| 901 | TTLVELERQL RKENEKQKNE LLSMEAEVCE KIGCLQRFKE MAIFKIAALQ KVVDNSVSLS |
| 961 | ELELANKQYN ELTAKYRDIL QKDNMLVQRT SNLEHLECEN ISLKEQVESI NKELEITKEK |
| 1021 | LHTIEQAWEQ ETKLGNESSM DKAKKSITNS DIVSISKKIT MLEMKELNER QRAEHCQKMY |
| 1081 | EHLRTSLKQM EERNFELETK FAELTKINLD AQKVEQMLRD ELADSVSKAV SDADRQRILE |
| 1141 | LEKNEMELKV EVSKLREISD IARRQVEILN AQQQSRDKEV ESLRMQLLDY QAQSDEKSLI |
| 1201 | AKLHQHNVSL QLSEATALGK LESITSKLQK MEAYNLRLEQ KLDEKEQALY YARLEGRNRA |
| 1261 | KHLRQTIQSL RRQFSGALPL AQQEKFSKTM IQLQNDKLKI MQEMKNSQQE HRNMENKTLE |
| 1321 | MELKLKGLEE LISTLKDTKG AQKVINWHMK IEELRLQELK LNRELVKDKE EIKYLNNIIS |
| 1381 | EYERTISSLE EEIVQQNKFH EERQMAWDQR EVDLERQLDI FDRQQNEILN AAQKFEEATG |
| 1441 | SIPDPSLPLP NQLEIALRKI KENIRIILET RATCKSLEEK LKEKESALRL AEQNILSRDK |
| 1501 | VINELRLRLP ATAEREKLIA ELGRKEMEPK SHHTLKIAHQ TIANMQARLN QKEEVLKKYQ |
| 1561 | RLLEKAREEQ REIVKKHEED LHILHHRLEL QADSSLNKFK QTAWDLMKQS PTPVPTNKHF |
| 1621 | IRLAEMEQTV AEQDDSLSSL LVKLKKVSQD LERQREITEL KVKEFENIKL QLQENHEDEV |
| 1681 | KKVKAEVEDL KYLLDQSQKE SQCLKSELQA QKEANSRAPT TTMRNLVERL KSQLALKEKQ |
| 1741 | QKALSRALLE LRAEMTAAAE ERIISATSQK EAHLNVQQIV DRHTRELKTQ VEDLNENLLK |
| 1801 | LKEALKTSKN RENSLTDNLN DLNNELQKKQ KAYNKILREK EEIDQENDEL KRQIKRLTSG |
| 1861 | LQGKPLTDNK QSLIEELQRK VKKLENQLEG KVEEVDLKPM KEKNAKEELI RWEEGKKWQA |
| 1921 | KIEGIRNKLK EKEGEVFTLT KQLNTLKDLF AKADKEKLTL QRKLKTTGMT VDQVLGIRAL |
| 1981 | ESEKELEELK KRNLDLENDI LYMRAHQALP RDSVVEDLHL QNRYLQEKLH ALEKQFSKDT |
| 2041 | YSKPSISGIE SDDHCQREQE LQKENLKLSS ENIELKFQLE QANKDLPRLK NQVRDLKEMC |
| 2101 | EFLKKEKAEV QRKLGHVRGS GRSGKTIPEL EKTIGLMKKV VEKVQRENEQ LKKASGILTS |
| 2161 | EKMANIEQEN EKLKAELEKL KAHLGHQLSM HYESKTKGTE KIIAENERLR KELKKETDAA |
| 2221 | EKLRIAKNNL EILNEKMTVQ LEETGKRLQF AESRGPQLEG ADSKSWKSIV VTRMYETKLK |
| 2281 | ELETDIAKKN QSITDLKQLV KEATEREQKV NKYNEDLEQQ IKILKHVPEG AETEQGLKRE |
| 2341 | LQVLRLANHQ LDKEKAELIH QIEANKDQSG AESTIPDADQ LKEKIKDLET QLKMSDLEKQ |
| 2401 | HLKEEIKKLK KELENFDPSF FEEIEDLKYN YKEEVKKNIL LEEKVKKLSE QLGVELTSPV |
| 2461 | AASEEFEDEE ESPVNFPIY |

SEQ ID NO: 63
CENTROSOMAL PROTEIN 290 (CEP290), ISOFORM X1
XP_011537059.1

| | |
|---|---|
| 1 | MPPNINWKEI MKVDPDDLPR QEELADNLLI SLSKVEVNEL KSEKQENVIH LFRITQSLMK |
| 61 | MKAQEVELAL EEVEKAGEEQ AKFENQLKTK VMKLENELEM AQQSAGGRDT RFLRNEICQL |
| 121 | EKQLEQKDRE LEDMEKELEK EKKVNEQLAL RNEEAENENS KLRRENKRLK KKNEQLCQDI |
| 181 | IDYQKQIDSQ KETLLSRRGE DSDYRSQLSK KNYELIQYLD EIQTLTEANE KIEVQNQEMR |
| 241 | KNLEESVQEM EKMTDEYNRM KAIVHQTDNV IDQLKKENDH YQLQVQELTD LLKSKNEEDD |
| 301 | PIMVAVNAKV EEWKLILSSK DDEIIEYQQM LHNLREKLKN AQLDADKSNV MALQQGIQER |
| 361 | DSQIKMLTEQ VEQYTKEMEK NTCIIEDLKN ELQRNKGAST LSQQTHMKIQ STLDILKEKT |
| 421 | KEAERTAELA EADAREKDKE LVEALKRLKD YESGVYGLED AVVEIKNCKN QIKIRDREIE |
| 481 | ILTKEINKLE LKISDFLDEN EALRERVGLE PKTMIDLTEF RNSKHLKQQQ YRAENQILLK |
| 541 | EIESLEEERL DLKKKIRQMA QERGKRSATS GLTTEDLNLT ENISQGDRIS ERKLDLLSLK |
| 601 | NMSEAQSKIR SSDKAELLHR RSSFNTPQSD QNETEENMTI GSLSRMLSEI HHSVESGMHP |
| 661 | FVPLTRLSSS MQVKENSTPE TITIREIFKA PCLQSSRNLE SLVSTFSRES HEEINDICLF |
| 721 | SDDCMKKVSR SHQALEKTSF VQKSNSSFHG LSTASDIMQK LSLRQKSAIF CQQIHENRAD |
| 781 | MDKSQVATLE EEQVHSQVKY ADINLKEDII KSEVPLQTEI LKNKLKVNLP DPVSITAQSK |
| 841 | LSQINSLENL IEQLRRELVF LRSQNEIIAQ EFLIKEAECR NADIELEHHR SQAEQNEFLS |
| 901 | RELIEKERDL ERSRTVIAKF QNKLKELVEE NKQLEEGMKE ILQAIKEMQK DPDVKGGETS |
| 961 | LIIPSLERLV NAIESKNAEG IFDASLHLKA QVDQLTGRNE ELRQELRESR KEAINYSQQL |
| 1021 | AKANLKIDHL EKETSLLRQS EGSNVVFKGI DLPDGIAPSS ASIINSQNEY LIHLLQELEN |
| 1081 | KEKKLKNLED SLEDYNRKFA VIRHQQSLLY KEYLSEKETW KTESKTIKEE KRKLEDQVQQ |
| 1141 | DAIKVKEYNN LLNALQMDSD EMKKILAENS RKITVLQVNE KSLIRQYTTL VELERQLRKE |
| 1201 | NEKQKNELLS MEAEVCEKIG CLQRFKEMAI FKIAALQKVV DNSVSLSELE LANKQYNELT |
| 1261 | AKYRDILQKD NMLVQRTSNL EHLECENISL KEQVESINKE LEITKEKLHT IEQAWEQETK |
| 1321 | LGNESSMDKA KKSITNSDIV SISKKITMLE MKELNERQRA EHCQKMYEHL RTSLKQMEER |
| 1381 | NFELETKFAE LTKINLDAQK VEQMLRDELA DSVSKAVSDA DRQRILELEK NEMELKVEVS |
| 1441 | KLREISDIAR RQVEILNAQQ QSRDKEVESL RMQLLDYQAQ SDEKSLIAKL HQHNVSLQLS |
| 1501 | EATALGKLES ITSKLQKMEA YNLRLEQKLD EKEQALYYAR LEGRNRAKHL RQTIQSLRRQ |
| 1561 | FSGALPLAQQ EKFSKTMIQL QNDKLKIMQE MKNSQQEHRN MENKTLEMEL KLKGLEELIS |
| 1621 | TLKDTKGAQK VINWHMKIEE LRLQELKLNR ELVKDKEEIK YLNNIISEYE RTISSLEEEI |
| 1681 | VQQNKFHEER QMAWDQREVD LERQLDIFDR QQNEILNAAQ KFEEATGSIP DPSLPLPNQL |
| 1741 | EIALRKIKEN IRIILETRAT CKSLEEKLKE KESALRLAEQ NILSRDKVIN ELRLRLPATA |
| 1801 | EREKLIAELG RKEMEPKSHH TLKIAHQTIA NMQARLNQKE EVLKKYQRLL EKAREEQREI |
| 1861 | VKKHEEDLHI LHHRLELQAD SSLNKFKQTA WDLMKQSPTP VPTNKHFIRL AEMEQTVAEQ |
| 1921 | DDSLSSLLVK LKKVSQDLER QREITELKVK EFENIKLQLQ ENHEDEVKKV KAEVEDLKYL |
| 1981 | LDQSQKESQC LKSELQAQKE ANSRAPTTTM RNLVERLKSQ LALKEKQQKA LSRALLELRA |
| 2041 | EMTAAAEERI ISATSQKEAH LNVQQIVDRH TRELKTQVED LNENLLKLKE ALKTSKNREN |
| 2101 | SLTDNLNDLN NELQKKQKAY NKILREKEEI DQENDELKRQ IKRLTSGLQG KPLTDNKQSL |
| 2161 | IEELQRKVKK LENQLEGKVE EVDLKPMKEK NAKEELIRWE EGKKWQAKIE GIRNKLKEKE |
| 2221 | GEVFTLTKQL NTLKDLFAKA DKEKLTLQRK LKTTGMTVDQ VLGIRALESE KELEELKKRN |
| 2281 | LDLENDILYM RAHQALPRDS VVEDLHLQNR YLQEKLHALE KQFSKDTYSK PSQNQISGIE |
| 2341 | SDDHCQREQE LQKENLKLSS ENIELKFQLE QANKDLPRLK NQVRDLKEMC EFLKKEKAEV |
| 2401 | QRKLGHVRGS GRSGKTIPEL EKTIGLMKKV VEKVQRENEQ LKKASGILTS EKMANIEQEN |
| 2461 | EKLKAELEKL KAHLGHQLSM HYESKTKGTE KIIAENERLR KELKKETDAA EKLRIAKNNL |
| 2521 | EILNEKMTVQ LEETGKRLQF AESRGPQLEG ADSKSWKSIV VTRMYETKLK ELETDIAKKN |
| 2581 | QSITDLKQLV KEATEREQKV NKYNEDLEQQ IKILKHVPEG AETEQGLKRE LQVLRLANHQ |
| 2641 | LDKEKAELIH QIEANKDQSG AESTIPDADQ LKEKIKDLET QLKMSDLEKQ HLKEEIKKLK |
| 2701 | KELENFDPSF FEEIEDLKYN YKEEVKKNIL LEEKVKKLSE QLGVELTSPV AASEEFEDEE |
| 2761 | ESPVNFPIY |

SEQ ID NO: 64
CENTROSOMAL PROTEIN 290 (CEP290), ISOFORM X2
XP_011537060.1

| | |
|---|---|
| 1 | MPPNINWKEI MKVDPDDLPR QEELADNLLI SLSKVEVNEL KSEKQENVIH LFRITQSLMK |
| 61 | MKAQEVELAL EEVEKAGEEQ AKFENQLKTK VMKLENELEM AQQSAGGRDT RFLRNEICQL |
| 121 | EKQLEQKDRE LEDMEKELEK EKKVNEQLAL RNEEAENENS KLRRENKRLK KKNEQLCQDI |
| 181 | IDYQKQIDSQ KETLLSRRGE DSDYRSQLSK KNYELIQYLD EIQTLTEANE KIEVQNQEMR |
| 241 | KNLEESVQEM EKMTDEYNRM KAIVHQTDNV IDQLKKENDH YQLQVQELTD LLKSKNEEDD |
| 301 | PIMVAVNAKV EEWKLILSSK DDEIIEYQQM LHNLREKLKN AQLDADKSNV MALQQGIQER |
| 361 | DSQIKMLTEQ VEQYTKEMEK NTCIIEDLKN ELQRNKGAST LSQQTHMKIQ STLDILKEKT |
| 421 | KEAERTAELA EADAREKDKE LVEALKRLKD YESGVYGLED AVVEIKNCKN QIKIRDREIE |
| 481 | ILTKEINKLE LKISDFLDEN EALRERVGLE PKTMIDLTEF RNSKHLKQQQ YRAENQILLK |
| 541 | EIESLEEERL DLKKKIRQMA QERGKRSATS GLTTEDLNLT ENISQGDRIS ERKLDLLSLK |
| 601 | NMSEAQSKIR SSDKAELLHR RSSFNTPQSD QNETEENMTI GSLSRMLSEI HHSVESGMHP |
| 661 | FVPLTRLSSS MQVKENSTPE TITIREIFKA PCLQSSRNLE SLVSTFSRES HEEINDICLF |
| 721 | SDDCMKKVSR SHQALEKTSF VQKSNSSFHG LSTASDIMQK LSLRQKSAIF CQQIHENRAD |
| 781 | MDKSQVATLE EEQVHSQVKY ADINLKEDII KSEVPLQTEI LKNKLKVNLP DPVSITAQSK |
| 841 | LSQINSLENL IEQLRRELVF LRSQNEIIAQ EFLIKEAECR NADIELEHHR SQAEQNEFLS |
| 901 | RELIEKERDL ERSRTVIAKF QNKLKELVEE NKQLEEGMKE ILQAIKEMQK DPDVKGGETS |
| 961 | LIIPSLERLV NAIESKNAEG IFDASLHLKA QVDQLTGRNE ELRQELRESR KEAINYSQQL |
| 1021 | AKANLKIDHL EKETSLLRQS EGSNVVFKGI DLPDGIAPSS ASIINSQNEY LIHLLQELEN |
| 1081 | KEKKLKNLED SLEDYNRKFA VIRHQQSLLY KEYLSEKETW KTESKTIKEE KRKLEDQVQQ |
| 1141 | DAIKVKEYNN LLNALQMDSD EMKKILAENS RKITVLQVNE KSLIRQYTTL VELERQLRKE |
| 1201 | NEKQKNELLS MEAEVCEKIG CLQRFKEMAI FKIAALQKVV DNSVSLSELE LANKQYNELT |
| 1261 | AKYRDILQKD NMLVQRTSNL EHLECENISL KEQVESINKE LEITKEKLHT IEQAWEQETK |
| 1321 | LGNESSMDKA KKSITNSDIV SISKKITMLE MKELNERQRA EHCQKMYEHL RTSLKQMEER |
| 1381 | NFELETKFAE LTKINLDAQK VEQMLRDELA DSVSKAVSDA DRQRILELEK NEMELKVEVS |
| 1441 | KLREISDIAR RQVEILNAQQ QSRDKEVESL RMQLLDYQAQ SDEKSLIAKL HQHNVSLQLS |
| 1501 | EATALGKLES ITSKLQKMEA YNLRLEQKLD EKEQALYYAR LEGRNRAKHL RQTIQSLRRQ |
| 1561 | FSGALPLAQQ EKFSKTMIQL QNDKLKIMQE MKNSQQEHRN MENKTLEMEL KLKGLEELIS |
| 1621 | TLKDTKGAQK VINWHMKIEE LRLQELKLNR ELVKDKEEIK YLNNIISEYE RTISSLEEEI |
| 1681 | VQQNKFHEER QMAWDQREVD LERQLDIFDR QQNEILNAAQ KFEEATGSIP DPSLPLPNQL |
| 1741 | EIALRKIKEN IRIILETRAT CKSLEEKLKE KESALRLAEQ NILSRDKVIN ELRLRLPATA |
| 1801 | EREKLIAELG RKEMEPKSHH TLKIAHQTIA NMQARLNQKE EVLKKYQRLL EKAREEQREI |
| 1861 | VKKHEEDLHI LHHRLELQAD SSLNKFKQTA WDLMKQSPTP VPTNKHFIRL AEMEQTVAEQ |
| 1921 | DDSLSSLLVK LKKVSQDLER QREITELKVK EFENIKLQLQ ENHEDEVKKV KAEVEDLKYL |
| 1981 | LDQSQKESQC LKSELQAQKE ANSRAPTTTM RNLVERLKSQ LALKEKQQKA LSRALLELRA |
| 2041 | EMTAAAEERI ISATSQKEAH LNVQQIVDRH TRELKTQVED LNENLLKLKE ALKTSKNREN |
| 2101 | SLTDNLNDLN NELQKKQKAY NKILREKEEI DQENDELKRQ IKRLTSGLQG KPLTDNKQSL |
| 2161 | IEELQRKVKK LENQLEGKVE EVDLKPMKEK NAKEELIRWE EGKKWQAKIE GIRNKLKEKE |
| 2221 | GEVFTLTKQL NTLKDLFAKA DKEKLTLQRK LKTTGMTVDQ VLGIRALESE KELEELKKRN |
| 2281 | LDLENDILYM RAHQALPRDS VVEDLHLQNR YLQEKLHALE KQFSKDTYSK PSNQISGIES |
| 2341 | DDHCQREQEL QKENLKLSSE NIELKFQLEQ ANKDLPRLKN QVRDLKEMCE FLKKEKAEVQ |
| 2401 | RKLGHVRGSG RSGKTIPELE KTIGLMKKVV EKVQRENEQL KKASGILTSE KMANIEQENE |
| 2461 | KLKAELEKLK AHLGHQLSMH YESKTKGTEK IIAENERLRK ELKKETDAAE KLRIAKNNLE |
| 2521 | ILNEKMTVQL EETGKRLQFA ESRGPQLEGA DSKSWKSIVV TRMYETKLKE LETDIAKKNQ |
| 2581 | SITDLKQLVK EATEREQKVN KYNEDLEQQI KILKHVPEGA ETEQGLKREL QVLRLANHQL |
| 2641 | DKEKAELIHQ IEANKDQSGA ESTIPDADQL KEKIKDLETQ LKMSDLEKQH LKEEIKKLKK |
| 2701 | ELENFDPSFF EEIEDLKYNY KEEVKKNILL EEKVKKLSEQ LGVELTSPVA ASEEFEDEEE |
| 2761 | SPVNFPIY |

SEQ ID NO: 65
CENTROSOMAL PROTEIN 290 (CEP290), ISOFORM X3
XP_011537061.1

| | |
|---|---|
| 1 | MPPNINWKEI MKVDPDDLPR QEELADNLLI SLSKVEVNEL KSEKQENVIH LFRITQSLMK |
| 61 | MKAQEVELAL EEVEKAGEEQ AKFENQLKTK VMKLENELEM AQQSAGGRDT RFLRNEICQL |
| 121 | EKQLEQKDRE LEDMEKELEK EKKVNEQLAL RNEEAENENS KLRRENKRLK KKNEQLCQDI |
| 181 | IDYQKQIDSQ KETLLSRRGE DSDYRSQLSK KNYELIQYLD EIQTLTEANE KIEVQNQEMR |
| 241 | KNLEESVQEM EKMTDEYNRM KAIVHQTDNV IDQLKKENDH YQLQVQELTD LLKSKNEEDD |
| 301 | PIMVAVNAKV EEWKLILSSK DDEIIEYQQM LHNLREKLKN AQLDADKSNV MALQQGIQER |
| 361 | DSQIKMLTEQ VEQYTKEMEK NTCIIEDLKN ELQRNKGAST LSQQTHMKIQ STLDILKEKT |
| 421 | KEAERTAELA EADAREKDKE LVEALKRLKD YESGVYGLED AVVEIKNCKN QIKIRDREIE |
| 481 | ILTKEINKLE LKISDFLDEN EALRERVGLE PKTMIDLTEF RNSKHLKQQQ YRAENQILLK |
| 541 | EIESLEEERL DLKKKIRQMA QERGKRSATS GLTTEDLNLT ENISQGDRIS ERKLDLLSLK |
| 601 | NMSEAQSKIR SSDKAELLHR RSSFNTPQSD QNETEENMTI GSLSRMLSEI HHSVESGMHP |
| 661 | FVPLTRLSSS MQVKENSTPE TITIREIFKA PCLQSSRNLE SLVSTFSRES HEEINDICLF |
| 721 | SDDCMKKVSR SHQALEKTSF VQKSNSSFHG LSTASDIMQK LSLRQKSAIF CQQIHENRAD |
| 781 | MDKSQVATLE EEQVHSQVKY ADINLKEDII KSEVPLQTEI LKNKLKVNLP DPVSITAQSK |
| 841 | LSQINSLENL IEQLRRELVF LRSQNEIIAQ EFLIKEAECR NADIELEHHR SQAEQNEFLS |
| 901 | RELIEKERDL ERSRTVIAKF QNKLKELVEE NKQLEEGMKE ILQAIKEMQK DPDVKGGETS |
| 961 | LIIPSLERLV NAIESKNAEG IFDASLHLKA QVDQLTGRNE ELRQELRESR KEAINYSQQL |
| 1021 | AKANLKIDHL EKETSLLRQS EGSNVVFKGI DLPDGIAPSS ASIINSQNEY LIHLLQELEN |
| 1081 | KEKKLKNLED SLEDYNRKFA VIRHQQSLLY KEYLSEKETW KTESKTIKEE KRKLEDQVQQ |
| 1141 | DAIKVKEYNN LLNALQMDSD EMKKILAENS RKITVLQVNE KSLIRQYTTL VELERQLRKE |
| 1201 | NEKQKNELLS MEAEVCEKIG CLQRFKEMAI FKIAALQKVV DNSVSLSELE LANKQYNELT |
| 1261 | AKYRDILQKD NMLVQRTSNL EHLECENISL KEQVESINKE LEITKEKLHT IEQAWEQETK |
| 1321 | LGNESSMDKA KKSITNSDIV SISKKITMLE MKELNERQRA EHCQKMYEHL RTSLKQMEER |
| 1381 | NFELETKFAE LTKINLDAQK VEQMLRDELA DSVSKAVSDA DRQRILELEK NEMELKVEVS |
| 1441 | KLREISDIAR RQVEILNAQQ QSRDKEVESL RMQLLDYQAQ SDEKSLIAKL HQHNVSLQLS |
| 1501 | EATALGKLES ITSKLQKMEA YNLRLEQKLD EKEQALYYAR LEGRNRAKHL RQTIQSLRRQ |
| 1561 | FSGALPLAQQ EKFSKTMIQL QNDKLKIMQE MKNSQQEHRN MENKTLEMEL KLKGLEELIS |
| 1621 | TLKDTKGAQK VINWHMKIEE LRLQELKLNR ELVKDKEEIK YLNNIISEYE RTISSLEEEI |
| 1681 | VQQNKFHEER QMAWDQREVD LERQLDIFDR QQNEILNAAQ KFEEATGSIP DPSLPLPNQL |
| 1741 | EIALRKIKEN IRIILETRAT CKSLEEKLKE KESALRLAEQ NILSRDKVIN ELRLRLPATA |
| 1801 | EREKLIAELG RKEMEPKSHH TLKIAHQTIA NMQARLNQKE EVLKKYQRLL EKAREEQREI |
| 1861 | VKKHEEDLHI LHHRLELQAD SSLNKFKQTA WDLMKQSPTP VPTNKHFIRL AEMEQTVAEQ |
| 1921 | DDSLSSLLVK LKKVSQDLER QREITELKVK EFENIKLQLQ ENHEDEVKKV KAEVEDLKYL |
| 1981 | LDQSQKESQC LKSELQAQKE ANSRAPTTTM RNLVERLKSQ LALKEKQQKA LSRALLELRA |
| 2041 | EMTAAAEERI ISATSQKEAH LNVQQIVDRH TRELKTQVED LNENLLKLKE ALKTSKNREN |
| 2101 | SLTDNLNDLN NELQKKQKAY NKILREKEEI DQENDELKRQ IKRLTSGLQG KPLTDNKQSL |
| 2161 | IEELQRKVKK LENQLEGKVE EVDLKPMKEK NAKEELIRWE EGKKWQAKIE GIRNKLKEKE |
| 2221 | GEVFTLTKQL NTLKDLFAKA DKEKLTLQRK LKTTGMTVDQ VLGIRALESE KELEELKKRN |
| 2281 | LDLENDILYM RAHQALPRDS VVEDLHLQNR YLQEKLHALE KQFSKDTYSK PSISGIESDD |
| 2341 | HCQREQELQK ENLKLSSENI ELKFQLEQAN KDLPRLKNQV RDLKEMCEFL KKEKAEVQRK |
| 2401 | LGHVRGSGRS GKTIPELEKT IGLMKKVVEK VQRENEQLKK ASGILTSEKM ANIEQENEKL |
| 2461 | KAELEKLKAH LGHQLSMHYE SKTKGTEKII AENERLRKEL KKETDAAEKL RIAKNNLEIL |
| 2521 | NEKMTVQLEE TGKRLQFAES RGPQLEGADS KSWKSIVVTR MYETKLKELE TDIAKKNQSI |
| 2581 | TDLKQLVKEA TEREQKVNKY NEDLEQQIKI LKHVPEGAET EQGLKRELQV LRLANHQLDK |
| 2641 | EKAELIHQIE ANKDQSGAES TIPDADQLKE KIKDLETQLK MSDLEKQHLK EEIKKLKKEL |
| 2701 | ENFDPSFFEE IEDLKYNYKE EVKKNILLEE KVKKLSEQLG VELTSPVAAS EEFEDEEESP |
| 2761 | VNFPIY |

SEQ ID NO: 66
CENTROSOMAL PROTEIN 290 (CEP290), ISOFORM X4
XP_011537062.1

| | |
|---|---|
| 1 | MPPNINWKEI MKVDPDDLPR QEELADNLLI SLSKVEVNEL KSEKQENVIH LFRITQSLMK |
| 61 | MKAQEVELAL EEVEKAGEEQ AKFENQLKTK VMKLENELEM AQQSAGGRDT RFLRNEICQL |
| 121 | EKQLEQKDRE LEDMEKELEK EKKVNEQLAL RNEEAENENS KLRRENKRLK KKNEQLCQDI |
| 181 | IDYQKQIDSQ KETLLSRRGE DSDYRSQLSK KNYELIQYLD EIQTLTEANE KIEVQNQEMR |
| 241 | KNLEESVQEM EKMTDEYNRM KAIVHQTDNV IDQLKKENDH YQLQVQELTD LLKSKNEEDD |
| 301 | PIMVAVNAKV EEWKLILSSK DDEIIEYQQM LHNLREKLKN AQLDADKSNV MALQQGIQER |
| 361 | DSQIKMLTEQ VEQYTKEMEK NTCIIEDLKN ELQRNKGAST LSQQTHMKIQ STLDILKEKT |
| 421 | KEAERTAELA EADAREKDKE LVEALKRLKD YESGVYGLED AVVEIKNCKN QIKIRDREIE |
| 481 | ILTKEINKLE LKISDFLDEN EALRERVGLE PKTMIDLTEF RNSKHLKQQQ YRAENQILLK |
| 541 | EIESLEEERL DLKKKIRQMA QERGKRSATS GLTTEDLNLT ENISQGDRIS ERKLDLLSLK |
| 601 | NMSEAQSKIR SSDKAELLHR RSSFNTPQSD QNETEENMTI GSLSRMLSEI HHSVESGMHP |
| 661 | FVPLTRLSSS MQVKENSTPE TITIREIFKA PCLQSSRNLE SLVSTFSRES HEEINDICLF |
| 721 | SDDCMKKVSR SHQALEKTSF VQKSNSSFHG LSTASDIMQK LSLRQKSAIF CQQIHENRAD |
| 781 | MDKSQVATLE EEQVHSQVKY ADINLKEDII KSEVPLQTEI LKNKLKVNLP DPVSITAQSK |
| 841 | LSQINSLENL IEQLRRELVF LRSQNEIIAQ EFLIKEAECR NADIELEHHR SQAEQNEFLS |
| 901 | RELIEKERDL ERSRTVIAKF QNKLKELVEE NKQLEEGMKE ILQAIKEMQK DPDVKGGETS |
| 961 | LIIPSLERLV NAIESKNAEG IFDASLHLKA QVDQLTGRNE ELRQELRESR KEAINYSQQL |
| 1021 | AKANLKIDHL EKETSLLRQS EGSNVVFKGI DLPDGIAPSS ASIINSQNEY LIHLLQELEN |
| 1081 | KEKKLKNLED SLEDYNRKFA VIRHQQSLLY KEYLSEKETW KTESKTIKEE KRKLEDQVQQ |
| 1141 | DAIKVKEYNN LLNALQMDSD EMKKILAENS RKITVLQVNE KSLIRQYTTL VELERQLRKE |
| 1201 | NEKQKNELLS MEAEVCEKIG CLQRFKEMAI FKIAALQKVV DNSVSLSELE LANKQYNELT |
| 1261 | AKYRDILQKD NMLVQRTSNL EHLECENISL KEQVESINKE LEITKEKLHT IEQAWEQETK |
| 1321 | LGNESSMDKA KKSITNSDIV SISKKITMLE MKELNERQRA EHCQKMYEHL RTSLKQMEER |
| 1381 | NFELETKFAE LTKINLDAQK VEQMLRDELA DSVSKAVSDA DRQRILELEK NEMELKVEVS |
| 1441 | KLREISDIAR RQVEILNAQQ QSRDKEVESL RMQLLDYQAQ SDEKSLIAKL HQHNVSLQLS |
| 1501 | EATALGKLES ITSKLQKMEA YNLRLEQKLD EKEQALYYAR LEGRNRAKHL RQTIQSLRRQ |
| 1561 | FSGALPLAQQ EKFSKTMIQL QNDKLKIMQE MKNSQQEHRN MENKTLEMEL KLKGLEELIS |
| 1621 | TLKDTKGAQK VINWHMKIEE LRLQELKLNR ELVKDKEEIK YLNNIISEYE RTISSLEEEI |
| 1681 | VQQNKFHEER QMAWDQREVD LERQLDIFDR QQNEILNAAQ KFEEATGSIP DPSLPLPNQL |
| 1741 | EIALRKIKEN IRIILETRAT CKSLEEKLKE KESALRLAEQ NILSRDKVIN ELRLRLPATA |
| 1801 | EREKLIAELG RKEMEPKSHH TLKIAHQTIA NMQARLNQKE EVLKKYQRLL EKAREEQREI |
| 1861 | VKKHEEDLHI LHHRLELQAD SSLNKFKQTA WDLMKQSPTP VPTNKHFIRL AEMEQTVAEQ |
| 1921 | DDSLSSLLVK LKKVSQDLER QREITELKVK EFENIKLQLQ ENHEDEVKKV KAEVEDLKYL |
| 1981 | LDQSQKESQC LKSELQAQKE ANSRAPTTTM RNLVERLKSQ LALKEKQQKA LSRALLELRA |
| 2041 | EMTAAAEERI ISATSQKEAH LNVQQIVDRH TRELKTQVED LNENLLKLKE ALKTSKNREN |
| 2101 | SLTDNLNDLN NELQKKQKAY NKILREKEEI DQENDELKRQ IKRLTSGLQG KPLTDNKQSL |
| 2161 | IEELQRKVKK LENQLEGKVE EVDLKPMKEK NAKEELIRWE EGKKWQAKIE GIRNKLKEKE |
| 2221 | GEVFTLTKQL NTLKDLFAKA DKEKLTLQRK LKTTGMTVDQ VLGIRALESE KELEELKKRN |
| 2281 | LDLENDILYM RAHQALPRDS VVEDLHLQNR YLQEKLHALE KQFSKDTYSK PSQNQISGIE |
| 2341 | SDDHCQREQE LQKENLKLSS ENIELKFQLE QANKDLPRLK NQVRDLKEMC EFLKKEKAEV |
| 2401 | QRKLGHVRGS GRSGKTIPEL EKTIGLMKKV VEKVQRENEQ LKKASGILTS EKMANIEQEN |
| 2461 | EKLKETDAAE KLRIAKNNLE ILNEKMTVQL EETGKRLQFA ESRGPQLEGA DSKSWKSIVV |
| 2521 | TRMYETKLKE LETDIAKKNQ SITDLKQLVK EATEREQKVN KYNEDLEQQI KILKHVPEGA |
| 2581 | ETEQGLKREL QVLRLANHQL DKEKAELIHQ IEANKDQSGA ESTIPDADQL KEKIKDLETQ |
| 2641 | LKMSDLEKQH LKEEIKKLKK ELENFDPSFF EEIEDLKYNY KEEVKKNILL EEKVKKLSEQ |
| 2701 | LGVELTSPVA ASEEFEDEEE SPVNFPIY |

SEQ ID NO: 67
CENTROSOMAL PROTEIN 290 (CEP290), ISOFORM X5
XP_016875469.1

| | |
|---|---|
| 1 | MPPNINWKEI MKVDPDDLPR QEELADNLLI SLSKVEVNEL KSEKQENVIH LFRITQSLMK |
| 61 | MKAQEVELAL EEVEKAGEEQ AKFENQLKTK VMKLENELEM AQQSAGGRDT RFLRNEICQL |
| 121 | EKQLEQKDRE LEDMEKELEK EKKVNEQLAL RNEEAENENS KLRRENKRLK KKNEQLCQDI |
| 181 | IDYQKQIDSQ KETLLSRRGE DSDYRSQLSK KNYELIQYLD EIQTLTEANE KIEVQNQEMR |
| 241 | KNLEESVQEM EKMTDEYNRM KAIVHQTDNV IDQLKKENDH YQLQVQELTD LLKSKNEEDD |
| 301 | PIMVAVNAKV EEWKLILSSK DDEIIEYQQM LHNLREKLKN AQLDADKSNV MALQQGIQER |
| 361 | DSQIKMLTEQ VEQYTKEMEK NTCIIEDLKN ELQRNKGAST LSQQTHMKIQ STLDILKEKT |
| 421 | KEAERTAELA EADAREKDKE LVEALKRLKD YESGVYGLED AVVEIKNCKN QIKIRDREIE |
| 481 | ILTKEINKLE LKISDFLDEN EALRERVGLE PKTMIDLTEF RNSKHLKQQQ YRAENQILLK |
| 541 | EIESLEEERL DLKKKIRQMA QERGKRSATS GLTTEDLNLT ENISQGDRIS ERKLDLLSLK |
| 601 | NMSEAQSKIR SSDKAELLHR RSSFNTPQSD QNETEENMTI GSLSRMLSEI HHSVESGMHP |
| 661 | FVPLTRLSSS MQVKENSTPE TITIREIFKA PCLQSSRNLE SLVSTFSRES HEEINDICLF |
| 721 | SDDCMKKVSR SHQALEKTSF VQKSNSSFHG LSTASDIMQK LSLRQKSAIF CQQIHENRAD |
| 781 | MDKSQVATLE EEQVHSQVKY ADINLKEDII KSEVPLQTEI LKNKLKVNLP DPVSITAQSK |
| 841 | LSQINSLENL IEQLRRELVF LRSQNEIIAQ EFLIKEAECR NADIELEHHR SQAEQNEFLS |
| 901 | RELIEKERDL ERSRTVIAKF QNKLKELVEE NKQLEEGMKE ILQAIKEMQK DPDVKGGETS |
| 961 | LIIPSLERLV NAIESKNAEG IFDASLHLKA QVDQLTGRNE ELRQELRESR KEAINYSQQL |
| 1021 | AKANLKIDHL EKETSLLRQS EGSNVVFKGI DLPDGIAPSS ASIINSQNEY LIHLLQELEN |
| 1081 | KEKKLKNLED SLEDYNRKFA VIRHQQSLLY KEYLSEKETW KTESKTIKEE KRKLEDQVQQ |
| 1141 | DAIKVKEYNN LLNALQMDSD EMKKILAENS RKITVLQVNE KSLIRQYTTL VELERQLRKE |
| 1201 | NEKQKNELLS MEAEVCEKIG CLQRFKEMAI FKIAALQKVV DNSVSLSELE LANKQYNELT |
| 1261 | AKYRDILQKD NMLVQRTSNL EHLECENISL KEQVESINKE LEITKEKLHT IEQAWEQETK |
| 1321 | LGNESSMDKA KKSITNSDIV SISKKITMLE MKELNERQRA EHCQKMYEHL RTSLKQMEER |
| 1381 | NFELETKFAE LTKINLDAQK VEQMLRDELA DSVSKAVSDA DRQRILELEK NEMELKVEVS |
| 1441 | KLREISDIAR RQVEILNAQQ QSRDKEVESL RMQLLDYQAQ SDEKSLIAKL HQHNVSLQLS |
| 1501 | EATALGKLES ITSKLQKMEA YNLRLEQKLD EKEQALYYAR LEGRNRAKHL RQTIQSLRRQ |
| 1561 | FSGALPLAQQ EKFSKTMIQL QNDKLKIMQE MKNSQQEHRN MENKTLEMEL KLKGLEELIS |
| 1621 | TLKDTKGAQK VINWHMKIEE LRLQELKLNR ELVKDKEEIK YLNNIISEYE RTISSLEEEI |
| 1681 | VQQNKFHEER QMAWDQREVD LERQLDIFDR QQNEILNAAQ KFEEATGSIP DPSLPLPNQL |
| 1741 | EIALRKIKEN IRIILETRAT CKSLEEKLKE KESALRLAEQ NILSRDKVIN ELRLRLPATA |
| 1801 | EREKLIAELG RKEMEPKSHH TLKIAHQTIA NMQARLNQKE EVLKKYQRLL EKAREEQREI |
| 1861 | VKKHEEDLHI LHHRLELQAD SSLNKFKQTA WDLMKQSPTP VPTNKHFIRL AEMEQTVAEQ |
| 1921 | DDSLSSLLVK LKKVSQDLER QREITELKVK EFENIKLQLQ ENHEDEVKKV KAEVEDLKYL |
| 1981 | LDQSQKESQC LKSELQAQKE ANSRAPTTTM RNLVERLKSQ LALKEKQQKA LSRALLELRA |
| 2041 | EMTAAAEERI ISATSQKEAH LNVQQIVDRH TRELKTQVED LNENLLKLKE ALKTSKNREN |
| 2101 | SLTDNLNDLN NELQKKQKAY NKILREKEEI DQENDELKRQ IKRLTSGLQG KPLTDNKQSL |
| 2161 | IEELQRKVKK LENQLEGKVE EVDLKPMKEK NAKEELIRWE EGKKWQAKIE GIRNKLKEKE |
| 2221 | GEVFTLTKQL NTLKDLFAKA DKEKLTLQRK LKTTGMTVDQ VLGIRALESE KELEELKKRN |
| 2281 | LDLENDILYM RAHQALPRDS VVEDLHLQNR YLQEKLHALE KQFSKDTYSK PSISGIESDD |
| 2341 | HCQREQELQK ENLKLSSENI ELKFQLEQAN KDLPRLKNQV RDLKEMCEFL KKEKAEVQRK |
| 2401 | LGHVRGSGRS GKTIPELEKT IGLMKKVVEK VQRENEQLKK ASGILTSEKM ANIEQENEKL |
| 2461 | KETDAAEKLR IAKNNLEILN EKMTVQLEET GKRLQFAESR GPQLEGADSK SWKSIVVTRM |
| 2521 | YETKLKELET DIAKKNQSIT DLKQLVKEAT EREQKVNKYN EDLEQQIKIL KHVPEGAETE |
| 2581 | QGLKRELQVL RLANHQLDKE KAELIHQIEA NKDQSGAEST IPDADQLKEK IKDLETQLKM |
| 2641 | SDLEKQHLKE EIKKLKKELE NFDPSFFEEI EDLKYNYKEE VKKNILLEEK VKKLSEQLGV |
| 2701 | ELTSPVAASE EFEDEEESPV NFPIY |

SEQ ID NO: 68
CENTROSOMAL PROTEIN 290 (CEP290), ISOFORM X6
XP_011537063.1

| | |
|---|---|
| 1 | MPPNINWKEI MKVDPDDLPR QEELADNLLI SLSKVEVNEL KSEKQENVIH LFRITQSLMK |
| 61 | MKAQEVELAL EEVEKAGEEQ AKFENQLKTK VMKLENELEM AQQSAGGRDT RFLRNEICQL |
| 121 | EKQLEQKDRE LEDMEKELEK EKKVNEQLAL RNEEAENENS KLRRENKRLK KKNEQLCQDI |
| 181 | IDYQKQIDSQ KETLLSRRGE DSDYRSQLSK KNYELIQYLD EIQTLTEANE KIEVQNQEMR |
| 241 | KNLEESVQEM EKMTDEYNRM KAIVHQTDNV IDQLKKENDH YQLQVQELTD LLKSKNEEDD |
| 301 | PIMVAVNAKV EEWKLILSSK DDEIIEYQQM LHNLREKLKN AQLDADKSNV MALQQGIQER |
| 361 | DSQIKMLTEQ VEQYTKEMEK NTCIIEDLKN ELQRNKGAST LSQQTHMKIQ STLDILKEKT |
| 421 | KEAERTAELA EADAREKDKE LVEALKRLKD YESGVYGLED AVVEIKNCKN QIKIRDREIE |
| 481 | ILTKEINKLE LKISDFLDEN EALRERVGLE PKTMIDLTEF RNSKHLKQQQ YRAENQILLK |
| 541 | EIESLEEERL DLKKKIRQMA QERGKRSATS GLTTEDLNLT ENISQGDRIS ERKLDLLSLK |
| 601 | NMSEAQSKIR SSDKAELLHR RSSFNTPQSD QNETEENMTI GSLSRMLSEI HHSVESGMHP |
| 661 | FVPLTRLSSS MQVKENSTPE TITIREIFKA PCLQSSRNLE SLVSTFSRES HEEINDICLF |
| 721 | SDDCMKKVSR SHQALEKTSF VQKSNSSFHG LSTASDIMQK LSLRQKSAIF CQQIHENRAD |
| 781 | MDKSQVATLE EEQVHSQVKY ADINLKEDII KSEVPLQTEI LKNKLKVNLP DPVSITAQSK |
| 841 | LSQINSLENL IEQLRRELVF LRSQNEIIAQ EFLIKEAECR NADIELEHHR SQAEQNEFLS |
| 901 | RELIEKERDL ERSRTVIAKF QNKLKELVEE NKQLEEGMKE ILQAIKEMQK DPDVKGGETS |
| 961 | LIIPSLERLV NAIESKNAEG IFDASLHLKA QVDQLTGRNE ELRQELRESR KEAINYSQQL |
| 1021 | AKANLKIDHL EKETSLLRQS EGSNVVFKGI DLPDGIAPSS ASIINSQNEY LIHLLQELEN |
| 1081 | KEKKLKNLED SLEDYNRKFA VIRHQQSLLY KEYLSEKETW KTESKTIKEE KRKLEDQVQQ |
| 1141 | DAIKVKEYNN LLNALQMDSD EMKKILAENS RKITVLQVNE KSLIRQYTTL VELERQLRKE |
| 1201 | NEKQKNELLS MEAEVCEKIG CLQRFKEMAI FKIAALQKVV DNSVSLSELE LANKQYNELT |
| 1261 | AKYRDILQKD NMLVQRTSNL EHLECENISL KEQVESINKE LEITKEKLHT IEQAWEQETK |
| 1321 | LGNESSMDKA KKSITNSDIV SISKKITMLE MKELNERQRA EHCQKMYEHL RTSLKQMEER |
| 1381 | NFELETKFAE LTKINLDAQK VEQMLRDELA DSVSKAVSDA DRQRILELEK NEMELKVEVS |
| 1441 | KLREISDIAR RQVEILNAQQ QSRDKEVESL RMQLLDYQAQ SDEKSLIAKL HQHNVSLQLS |
| 1501 | EATALGKLES ITSKLQKMEA YNLRLEQKLD EKEQALYYAR LEGRNRAKHL RQTIQSLRRQ |
| 1561 | FSGALPLAQQ EKFSKTMIQL QNDKLKIMQE MKNSQQEHRN MENKTLEMEL KLKGLEELIS |
| 1621 | TLKDTKGAQK VINWHMKIEE LRLQELKLNR ELVKDKEEIK YLNNIISEYE RTISSLEEEI |
| 1681 | VQQNKFHEER QMAWDQREVD LERQLDIFDR QQNEILNAAQ KFEEATGSIP DPSLPLPNQL |
| 1741 | EIALRKIKEN IRIILETRAT CKSLEEKLKE KESALRLAEQ NILSRDKVIN ELRLRLPATA |
| 1801 | EREKLIAELG RKEMEPKSHH TLKIAHQTIA NMQARLNQKE EVLKKYQRLL EKAREEQREI |
| 1861 | VKKHEEDLHI LHHRLELQAD SSLNKFKQTA WDLMKQSPTP VPTNKHFIRL AEMEQTVAEQ |
| 1921 | DDSLSSLLVK LKKVSQDLER QREITELKVK EFENIKLQLQ ENHEDEVKKV KAEVEDLKYL |
| 1981 | LDQSQKESQC LKSELQAQKE ANSRAPTTTM RNLVERLKSQ LALKEKQQKA LSRALLELRA |
| 2041 | EMTAAAEERI ISATSQKEAH LNVQQIVDRH TRELKTQVED LNENLLKLKE ALKTSKNREN |
| 2101 | SLTDNLNDLN NELQKKQKAY NKILREKEEI DQENDELKRQ IKRLTSGLQG KPLTDNKQSL |
| 2161 | IEELQRKVKK LENQLEGKVE EVDLKPMKEK NAKEELIRWE EGKKWQAKIE GIRNKLKEKE |
| 2221 | GEVFTLTKQL NTLKDLFAKA DKEKLTLQRK LKTTGMTVDQ VLGIRALESE KELEELKKRN |
| 2281 | LDLENDILYM RAHQALPRDS VVEDLHLQNR YLQEKLHALE KQFSKDTYSK PSQNQISGIE |
| 2341 | SDDHCQREQE LQKENLKLSS ENIELKFQLE QANKDLPRLK NQVRDLKEMC EFLKKEKAEV |
| 2401 | QRKLGHVRGA ELEKLKAHLG HQLSMHYESK TKGTEKIIAE NERLRKELKK ETDAAEKLRI |
| 2461 | AKNNLEILNE KMTVQLEETG KRLQFAESRG PQLEGADSKS WKSIVVTRMY ETKLKELETD |
| 2521 | IAKKNQSITD LKQLVKEATE REQKVNKYNE DLEQQIKILK HVPEGAETEQ GLKRELQVLR |
| 2581 | LANHQLDKEK AELIHQIEAN KDQSGAESTI PDADQLKEKI KDLETQLKMS DLEKQHLKEE |
| 2641 | IKKLKKELEN FDPSFFEEIE DLKYNYKEEV KKNILLEEKV KKLSEQLGVE LTSPVAASEE |
| 2701 | FEDEEESPVN FPIY |

SEQ ID NO: 69
CENTROSOMAL PROTEIN 290 (CEP290), ISOFORM X7
XP_016875470.1

| | |
|---|---|
| 1 | MPPNINWKEI MKVDPDDLPR QEELADNLLI SLSKVEVNEL KSEKQENVIH LFRITQSLMK |
| 61 | MKAQEVELAL EEVEKAGEEQ AKFENQLKTK VMKLENELEM AQQSAGGRDT RFLRNEICQL |
| 121 | EKQLEQKDRE LEDMEKELEK EKKVNEQLAL RNEEAENENS KLRRENKRLK KKNEQLCQDI |
| 181 | IDYQKQIDSQ KETLLSRRGE DSDYRSQLSK KNYELIQYLD EIQTLTEANE KIEVQNQEMR |
| 241 | KNLEESVQEM EKMTDEYNRM KAIVHQTDNV IDQLKKENDH YQLQVQELTD LLKSKNEEDD |
| 301 | PIMVAVNAKV EEWKLILSSK DDEIIEYQQM LHNLREKLKN AQLDADKSNV MALQQGIQER |
| 361 | DSQIKMLTEQ VEQYTKEMEK NTCIIEDLKN ELQRNKGAST LSQQTHMKIQ STLDILKEKT |
| 421 | KEAERTAELA EADAREKDKE LVEALKRLKD YESGVYGLED AVVEIKNCKN QIKIRDREIE |
| 481 | ILTKEINKLE LKISDFLDEN EALRERVGLE PKTMIDLTEF RNSKHLKQQQ YRAENQILLK |
| 541 | EIESLEEERL DLKKKIRQMA QERGKRSATS GLTTEDLNLT ENISQGDRIS ERKLDLLSLK |
| 601 | NMSEAQSKIR SSDKAELLHR RSSFNTPQSD QNETEENMTI GSLSRMLSEI HHSVESGMHP |
| 661 | FVPLTRLSSS MQVKENSTPE TITIREIFKA PCLQSSRNLE SLVSTFSRES HEEINDICLF |
| 721 | SDDCMKKVSR SHQALEKTSF VQKSNSSFHG LSTASDIMQK LSLRQKSAIF CQQIHENRAD |
| 781 | MDKSQVATLE EEQVHSQVKY ADINLKEDII KSEVPLQTEI LKNKLKVNLP DPVSITAQSK |
| 841 | LSQINSLENL IEQLRRELVF LRSQNEIIAQ EFLIKEAECR NADIELEHHR SQAEQNEFLS |
| 901 | RELIEKERDL ERSRTVIAKF QNKLKELVEE NKQLEEGMKE ILQAIKEMQK DPDVKGGETS |
| 961 | LIIPSLERLV NAIESKNAEG IFDASLHLKA QVDQLTGRNE ELRQELRESR KEAINYSQQL |
| 1021 | AKANLKIDHL EKETSLLRQS EGSNVVFKGI DLPDGIAPSS ASIINSQNEY LIHLLQELEN |
| 1081 | KEKKLKNLED SLEDYNRKFA VIRHQQSLLY KEYLSEKETW KTESKTIKEE KRKLEDQVQQ |
| 1141 | DAIKVKEYNN LLNALQMDSD EMKKILAENS RKITVLQVNE KSLIRQYTTL VELERQLRKE |
| 1201 | NEKQKNELLS MEAEVCEKIG CLQRFKEMAI FKIAALQKVV DNSVSLSELE LANKQYNELT |
| 1261 | AKYRDILQKD NMLVQRTSNL EHLECENISL KEQVESINKE LEITKEKLHT IEQAWEQETK |
| 1321 | LGNESSMDKA KKSITNSDIV SISKKITMLE MKELNERQRA EHCQKMYEHL RTSLKQMEER |
| 1381 | NFELETKFAE LTKINLDAQK VEQMLRDELA DSVSKAVSDA DRQRILELEK NEMELKVEVS |
| 1441 | KLREISDIAR RQVEILNAQQ QSRDKEVESL RMQLLDYQAQ SDEKSLIAKL HQHNVSLQLS |
| 1501 | EATALGKLES ITSKLQKMEA YNLRLEQKLD EKEQALYYAR LEGRNRAKHL RQTIQSLRRQ |
| 1561 | FSGALPLAQQ EKFSKTMIQL QNDKLKIMQE MKNSQQEHRN MENKTLEMEL KLKGLEELIS |
| 1621 | TLKDTKGAQK VINWHMKIEE LRLQELKLNR ELVKDKEEIK YLNNIISEYE RTISSLEEEI |
| 1681 | VQQNKFHEER QMAWDQREVD LERQLDIFDR QQNEILNAAQ KFEEATGSIP DPSLPLPNQL |
| 1741 | EIALRKIKEN IRIILETRAT CKSLEEKLKE KESALRLAEQ NILSRDKVIN ELRLRLPATA |
| 1801 | EREKLIAELG RKEMEPKSHH TLKIAHQTIA NMQARLNQKE EVLKKYQRLL EKAREEQREI |
| 1861 | VKKHEEDLHI LHHRLELQAD SSLNKFKQTA WDLMKQSPTP VPTNKHFIRL AEMEQTVAEQ |
| 1921 | DDSLSSLLVK LKKVSQDLER QREITELKVK EFENIKLQLQ ENHEDEVKKV KAEVEDLKYL |
| 1981 | LDQSQKESQC LKSELQAQKE ANSRAPTTTM RNLVERLKSQ LALKEKQQKA LSRALLELRA |
| 2041 | EMTAAAEERI ISATSQKEAH LNVQQIVDRH TRELKTQVED LNENLLKLKE ALKTSKNREN |
| 2101 | SLTDNLNDLN NELQKKQKAY NKILREKEEI DQENDELKRQ IKRLTSGLQG KPLTDNKQSL |
| 2161 | IEELQRKVKK LENQLEGKVE EVDLKPMKEK NAKEELIRWE EGKKWQAKIE GIRNKLKEKE |
| 2221 | GEVFTLTKQL NTLKDLFAKA DKEKLTLQRK LKTTGMTVDQ VLGIRALESE KELEELKKRN |
| 2281 | LDLENDILYM RAHQALPRDS VVEDLHLQNR YLQEKLHALE KQFSKDTYSK PSISGIESDD |
| 2341 | HCQREQELQK ENLKLSSENI ELKFQLEQAN KDLPRLKNQV RDLKEMCEFL KKEKAEVQRK |
| 2401 | LGHVRGAELE KLKAHLGHQL SMHYESKTKG TEKIIAENER LRKELKKETD AAEKLRIAKN |
| 2461 | NLEILNEKMT VQLEETGKRL QFAESRGPQL EGADSKSWKS IVVIRMYETK LKELETDIAK |
| 2521 | KNQSITDLKQ LVKEATEREQ KVNKYNEDLE QQIKILKHVP EGAETEQGLK RELQVLRLAN |
| 2581 | HQLDKEKAEL IHQIEANKDQ SGAESTIPDA DQLKEKIKDL ETQLKMSDLE KQHLKEEIKK |
| 2641 | LKKELENFDP SFFEEIEDLK YNYKEEVKKN ILLEEKVKKL SEQLGVELTS PVAASEEFED |
| 2701 | EEESPVNFPI Y |

SEQ ID NO: 70
CENTROSOMAL PROTEIN 290 (CEP290), ISOFORM X8
XP_016875471.1

| | |
|---|---|
| 1 | MPPNINWKEI MKVDPDDLPR QEELADNLLI SLSKVEVNEL KSEKQENVIH LFRITQSLMK |
| 61 | MKAQEVELAL EEVEKAGEEQ AKFENQLKTK VMKLENELEM AQQSAGGRDT RFLRNEICQL |
| 121 | EKQLEQKDRE LEDMEKELEK EKKVNEQLAL RNEEAENENS KLRRENKRLK KKNEQLCQDI |
| 181 | IDYQKQIDSQ KETLLSRRGE DSDYRSQLSK KNYELIQYLD EIQTLTEANE KIEVQNQEMR |
| 241 | KNLEESVQEM EKMTDEYNRM KAIVHQTDNV IDQLKKENDH YQLQVQELTD LLKSKNEEDD |
| 301 | PIMVAVNAKV EEWKLILSSK DDEIIEYQQM LHNLREKLKN AQLDADKSNV MALQQGIQER |
| 361 | DSQIKMLTEQ VEQYTKEMEK NTCIIEDLKN ELQRNKGAST LSQQTHMKIQ STLDILKEKT |
| 421 | KEAERTAELA EADAREKDKE LVEALKRLKD YESGVYGLED AVVEIKNCKN QIKIRDREIE |
| 481 | ILTKEINKLE LKISDFLDEN EALRERVGLE PKTMIDLTEF RNSKHLKQQQ YRAENQILLK |
| 541 | EIESLEEERL DLKKKIRQMA QERGKRSATS GLTTEDLNLT ENISQGDRIS ERKLDLLSLK |
| 601 | NMSEAQSKIR SSDKAELLHR RSSFNTPQSD QNETEENMTI GSLSRMLSEI HHSVESGMHP |
| 661 | FVPLTRLSSS MQVKENSTPE TITIREIFKA PCLQSSRNLE SLVSTFSRES HEEINDICLF |
| 721 | SDDCMKKVSR SHQALEKTSF VQKSNSSFHG LSTASDIMQK LSLRQKSAIF CQQIHENRAD |
| 781 | MDKSQVATLE EEQVHSQVKY ADINLKEDII KSEVPLQTEI LKNKLKVNLP DPVSITAQSK |
| 841 | LSQINSLENL IEQLRRELVF LRSQNEIIAQ EFLIKEAECR NADIELEHHR SQAEQNEFLS |
| 901 | RELIEKERDL ERSRTVIAKF QNKLKELVEE NKQLEEGMKE ILQAIKEMQK DPDVKGGETS |
| 961 | LIIPSLERLV NAIESKNAEG IFDASLHLKA QVDQLTGRNE ELRQELRESR KEAINYSQQL |
| 1021 | AKANLKIDHL EKETSLLRQS EGSNVVFKGI DLPDGIAPSS ASIINSQNEY LIHLLQELEN |
| 1081 | KEKKLKNLED SLEDYNRKFA VIRHQQSLLY KEYLSEKETW KTESKTIKEE KRKLEDQVQQ |
| 1141 | DAIKVKEYNN LLNALQMDSD EMKKILAENS RKITVLQVNE KSLIRQYTTL VELERQLRKE |
| 1201 | NEKQKNELLS MEAEVCEKIG CLQRFKEMAI FKIAALQKVV DNSVSLSELE LANKQYNELT |
| 1261 | AKYRDILQKD NMLVQRTSNL EHLECENISL KEQVESINKE LEITKEKLHT IEQAWEQETK |
| 1321 | LGNESSMDKA KKSITNSDIV SISKKITMLE MKELNERQRA EHCQKMYEHL RTSLKQMEER |
| 1381 | NFELETKFAE LTKINLDAQK VEQMLRDELA DSVSKAVSDA DRQRILELEK NEMELKVEVS |
| 1441 | KLREISDIAR RQVEILNAQQ QSRDKEVESL RMQLLDYQAQ SDEKSLIAKL HQHNVSLQLS |
| 1501 | EATALGKLES ITSKLQKMEA YNLRLEQKLD EKEQALYYAR LEGRNRAKHL RQTIQSLRRQ |
| 1561 | FSGALPLAQQ EKFSKTMIQL QNDKLKIMQE MKNSQQEHRN MENKTLEMEL KLKGLEELIS |
| 1621 | TLKDTKGAQK VINWHMKIEE LRLQELKLNR ELVKDKEEIK YLNNIISEYE RTISSLEEEI |
| 1681 | VQQNKFHEER QMAWDQREVD LERQLDIFDR QQNEILNAAQ KFEEATGSIP DPSLPLPNQL |
| 1741 | EIALRKIKEN IRIILETRAT CKSLEEKLKE KESALRLAEQ NILSRDKVIN ELRLRLPATA |
| 1801 | EREKLIAELG RKEMEPKSHH TLKIAHQTIA NMQARLNQKE EVLKKYQRLL EKAREEQREI |
| 1861 | VKKHEEDLHI LHHRLELQAD SSLNKFKQTA WDLMKQSPTP VPTNKHFIRL AEMEQTVAEQ |
| 1921 | DDSLSSLLVK LKKVSQDLER QREITELKVK EFENIKLQLQ ENHEDEVKKV KAEVEDLKYL |
| 1981 | LDQSQKESQC LKSELQAQKE ANSRAPTTTM RNLVERLKSQ LALKEKQQKA LSRALLELRA |
| 2041 | EMTAAAEERI ISATSQKEAH LNVQQIVDRH TRELKTQVED LNENLLKLKE ALKTSKNREN |
| 2101 | SLTDNLNDLN NELQKKQKAY NKILREKEEI DQENDELKRQ IKRLTSGLQG KPLTDNKQSL |
| 2161 | IEELQRKVKK LENQLEGKVE EVDLKPMKEK NAKEELIRWE EGKKWQAKIE GIRNKLKEKE |
| 2221 | GEVFTLTKQL NTLKDLFAKA DKEKLTLQRK LKTTGMTVDQ VLGIRALESE KELEELKKRN |
| 2281 | LDLENDILYM RAHQALPRDS VVEDLHLQNR YLQEKLHALE KQFSKDTYSK PSQNQISGIE |
| 2341 | SDDHCQREQE LQKENLKLSS ENIELKFQLE QANKDLPRLK NQVRDLKEMC EFLKKEKAEV |
| 2401 | QRKLGHVRGS GRSGKTIPEL EKTIGLMKKV VEKVQRENEQ LKKASGILTS EKMANIEQEN |
| 2461 | EKLKAELEKL KAHLGHQLSM HYESKTKGTE KIIAENERLR KELKKETDAA EKLRIAKNNL |
| 2521 | EILNEKMTVQ LEETGKRLQF AESRGPQLEG ADSKSWKSIV VTRMYETKLK ELETDIAKKN |
| 2581 | QSITDLKQLV KEATEREQKV NKYNEDLEQQ IS |

SEQ ID NO: 71
CENTROSOMAL PROTEIN 290 (CEP290), ISOFORM X9
XP_011537064.1

| | |
|---|---|
| 1 | MPPNINWKEI MKVDPDDLPR QEELADNLLI SLSKVEVNEL KSEKQENVIH LFRITQSLMK |
| 61 | MKAQEVELAL EEVEKAGEEQ AKFENQLKTK VMKLENELEM AQQSAGGRDT RFLRNEICQL |
| 121 | EKQLEQKDRE LEDMEKELEK EKKVNEQLAL RNEEAENENS KLRRENKRLK KKNEQLCQDI |
| 181 | IDYQKQIDSQ KETLLSRRGE DSDYRSQLSK KNYELIQYLD EIQTLTEANE KIEVQNQEMR |
| 241 | KNLEESVQEM EKMTDEYNRM KAIVHQTDNV IDQLKKENDH YQLQVQELTD LLKSKNEEDD |
| 301 | PIMVAVNAKV EEWKLILSSK DDEIIEYQQM LHNLREKLKN AQLDADKSNV MALQQGIQER |
| 361 | DSQIKMLTEQ VEQYTKEMEK NTCIIEDLKN ELQRNKGAST LSQQTHMKIQ STLDILKEKT |
| 421 | KEAERTAELA EADAREKDKE LVEALKRLKD YESGVYGLED AVVEIKNCKN QIKIRDREIE |
| 481 | ILTKEINKLE LKISDFLDEN EALRERVGLE PKTMIDLTEF RNSKHLKQQQ YRAENQILLK |
| 541 | EIESLEEERL DLKKKIRQMA QERGKRSATS GLTTEDLNLT ENISQGDRIS ERKLDLLSLK |
| 601 | NMSEAQSKNE IIAQEFLIKE AECRNADIEL EHHRSQAEQN EFLSRELIEK ERDLERSRTV |
| 661 | IAKFQNKLKE LVEENKQLEE GMKEILQAIK EMQKDPDVKG GETSLIIPSL ERLVNAIESK |
| 721 | NAEGIFDASL HLKAQVDQLT GRNEELRQEL RESRKEAINY SQQLAKANLK IDHLEKETSL |
| 781 | LRQSEGSNVV FKGIDLPDGI APSSASIINS QNEYLIHLLQ ELENKEKKLK NLEDSLEDYN |
| 841 | RKFAVIRHQQ SLLYKEYLSE KETWKTESKT IKEEKRKLED QVQQDAIKVK EYNNLLNALQ |
| 901 | MDSDEMKKIL AENSRKITVL QVNEKSLIRQ YTTLVELERQ LRKENEKQKN ELLSMEAEVC |
| 961 | EKIGCLQRFK EMAIFKIAAL QKVVDNSVSL SELELANKQY NELTAKYRDI LQKDNMLVQR |
| 1021 | TSNLEHLECE NISLKEQVES INKELEITKE KLHTIEQAWE QETKLGNESS MDKAKKSITN |
| 1081 | SDIVSISKKI TMLEMKELNE RQRAEHCQKM YEHLRTSLKQ MEERNFELET KFAELTKINL |
| 1141 | DAQKVEQMLR DELADSVSKA VSDADRQRIL ELEKNEMELK VEVSKLREIS DIARRQVEIL |
| 1201 | NAQQQSRDKE VESLRMQLLD YQAQSDEKSL IAKLHQHNVS LQLSEATALG KLESITSKLQ |
| 1261 | KMEAYNLRLE QKLDEKEQAL YYARLEGRNR AKHLRQTIQS LRRQFSGALP LAQQEKFSKT |
| 1321 | MIQLQNDKLK IMQEMKNSQQ EHRNMENKTL EMELKLKGLE ELISTLKDTK GAQKVINWHM |
| 1381 | KIEELRLQEL KLNRELVKDK EEIKYLNNII SEYERTISSL EEEIVQQNKF HEERQMAWDQ |
| 1441 | REVDLERQLD IFDRQQNEIL NAAQKFEEAT GSIPDPSLPL PNQLEIALRK IKENIRIILE |
| 1501 | TRATCKSLEE KLKEKESALR LAEQNILSRD KVINELRLRL PATAEREKLI AELGRKEMEP |
| 1561 | KSHHTLKIAH QTIANMQARL NQKEEVLKKY QRLLEKAREE QREIVKKHEE DLHILHHRLE |
| 1621 | LQADSSLNKF KQTAWDLMKQ SPTPVPTNKH FIRLAEMEQT VAEQDDSLSS LLVKLKKVSQ |
| 1681 | DLERQREITE LKVKEFENIK LQLQENHEDE VKKVKAEVED LKYLLDQSQK ESQCLKSELQ |
| 1741 | AQKEANSRAP TTTMRNLVER LKSQLALKEK QQKALSRALL ELRAEMTAAA EERIISATSQ |
| 1801 | KEAHLNVQQI VDRHTRELKT QVEDLNENLL KLKEALKTSK NRENSLTDNL NDLNNELQKK |
| 1861 | QKAYNKILRE KEEIDQENDE LKRQIKRLTS GLQGKPLTDN KQSLIEELQR KVKKLENQLE |
| 1921 | GKVEEVDLKP MKEKNAKEEL IRWEEGKKWQ AKIEGIRNKL KEKEGEVFTL TKQLNTLKDL |
| 1981 | FAKADKEKLT LQRKLKTTGM TVDQVLGIRA LESEKELEEL KKRNLDLEND ILYMRAHQAL |
| 2041 | PRDSVVEDLH LQNRYLQEKL HALEKQFSKD TYSKPSQNQI SGIESDDHCQ REQELQKENL |
| 2101 | KLSSENIELK FQLEQANKDL PRLKNQVRDL KEMCEFLKKE KAEVQRKLGH VRGSGRSGKT |
| 2161 | IPELEKTIGL MKKVVEKVQR ENEQLKKASG ILTSEKMANI EQENEKLKAE LEKLKAHLGH |
| 2221 | QLSMHYESKT KGTEKIIAEN ERLRKELKKE TDAAEKLRIA KNNLEILNEK MTVQLEETGK |
| 2281 | RLQFAESRGP QLEGADSKSW KSIVVTRMYE TKLKELETDI AKKNQSITDL KQLVKEATER |
| 2341 | EQKVNKYNED LEQQIKILKH VPEGAETEQG LKRELQVLRL ANHQLDKEKA ELIHQIEANK |
| 2401 | DQSGAESTIP DADQLKEKIK DLETQLKMSD LEKQHLKEEI KKLKKELENF DPSFFEEIED |
| 2461 | LKYNYKEEVK KNILLEEKVK KLSEQLGVEL TSPVAASEEF EDEEESPVNF PIY |

SEQ ID NO: 72
CENTROSOMAL PROTEIN 290 (CEP290), ISOFORM X10
XP_011537065.1

| | |
|---|---|
| 1 | MPPNINWKEI MKVDPDDLPR QEELADNLLI SLSKVEVNEL KSEKQENVIH LFRITQSLMK |
| 61 | MKAQEVELAL EEVEKAGEEQ AKFENQLKTK VMKLENELEM AQQSAGGRDT RFLRNEICQL |
| 121 | EKQLEQKDRE LEDMEKELEK EKKVNEQLAL RNEEAENENS KLRRENKRLK KKNEQLCQDI |
| 181 | IDYQKQIDSQ KETLLSRRGE DSDYRSQLSK KNYELIQYLD EIQTLTEANE KIEVQNQEMR |
| 241 | KNLEESVQEM EKMTDEYNRM KAIVHQTDNV IDQLKKENDH YQLQVQELTD LLKSKNEEDD |
| 301 | PIMVAVNAKV EEWKLILSSK DDEIIEYQQM LHNLREKLKN AQLDADKSNV MALQQGIQER |
| 361 | DSQIKMLTEQ VEQYTKEMEK NTCIIEDLKN ELQRNKGAST LSQQTHMKIQ STLDILKEKT |
| 421 | KEAERTAELA EADAREKDKE LVEALKRLKD YESGVYGLED AVVEIKNCKN QIKIRDREIE |
| 481 | ILTKEINKLE LKISDFLDEN EALRERVGLE PKTMIDLTEF RNSKHLKQQQ YRAENQILLK |
| 541 | EIESLEEERL DLKKKIRQMA QERGKRSATS GLTTEDLNLT ENISQGDRIS ERKLDLLSLK |
| 601 | NMSEAQSKNE FLSRELIEKE RDLERSRTVI AKFQNKLKEL VEENKQLEEG MKEILQAIKE |
| 661 | MQKDPDVKGG ETSLIIPSLE RLVNAIESKN AEGIFDASLH LKAQVDQLTG RNEELRQELR |
| 721 | ESRKEAINYS QQLAKANLKI DHLEKETSLL RQSEGSNVVF KGIDLPDGIA PSSASIINSQ |
| 781 | NEYLIHLLQE LENKEKKLKN LEDSLEDYNR KFAVIRHQQS LLYKEYLSEK ETWKTESKTI |
| 841 | KEEKRKLEDQ VQQDAIKVKE YNNLLNALQM DSDEMKKILA ENSRKITVLQ VNEKSLIRQY |
| 901 | TTLVELERQL RKENEKQKNE LLSMEAEVCE KIGCLQRFKE MAIFKIAALQ KVVDNSVSLS |
| 961 | ELELANKQYN ELTAKYRDIL QKDNMLVQRT SNLEHLECEN ISLKEQVESI NKELEITKEK |
| 1021 | LHTIEQAWEQ ETKLGNESSM DKAKKSITNS DIVSISKKIT MLEMKELNER QRAEHCQKMY |
| 1081 | EHLRTSLKQM EERNFELETK FAELTKINLD AQKVEQMLRD ELADSVSKAV SDADRQRILE |
| 1141 | LEKNEMELKV EVSKLREISD IARRQVEILN AQQQSRDKEV ESLRMQLLDY QAQSDEKSLI |
| 1201 | AKLHQHNVSL QLSEATALGK LESITSKLQK MEAYNLRLEQ KLDEKEQALY YARLEGRNRA |
| 1261 | KHLRQTIQSL RRQFSGALPL AQQEKFSKTM IQLQNDKLKI MQEMKNSQQE HRNMENKTLE |
| 1321 | MELKLKGLEE LISTLKDTKG AQKVINWHMK IEELRLQELK LNRELVKDKE EIKYLNNIIS |
| 1381 | EYERTISSLE EEIVQQNKFH EERQMAWDQR EVDLERQLDI FDRQQNEILN AAQKFEEATG |
| 1441 | SIPDPSLPLP NQLEIALRKI KENIRIILET RATCKSLEEK LKEKESALRL AEQNILSRDK |
| 1501 | VINELRLRLP ATAEREKLIA ELGRKEMEPK SHHTLKIAHQ TIANMQARLN QKEEVLKKYQ |
| 1561 | RLLEKAREEQ REIVKKHEED LHILHHRLEL QADSSLNKFK QTAWDLMKQS PTPVPTNKHF |
| 1621 | IRLAEMEQTV AEQDDSLSSL LVKLKKVSQD LERQREITEL KVKEFENIKL QLQENHEDEV |
| 1681 | KKVKAEVEDL KYLLDQSQKE SQCLKSELQA QKEANSRAPT TTMRNLVERL KSQLALKEKQ |
| 1741 | QKALSRALLE LRAEMTAAAE ERIISATSQK EAHLNVQQIV DRHTRELKTQ VEDLNENLLK |
| 1801 | LKEALKTSKN RENSLTDNLN DLNNELQKKQ KAYNKILREK EEIDQENDEL KRQIKRLTSG |
| 1861 | LQGKPLTDNK QSLIEELQRK VKKLENQLEG KVEEVDLKPM KEKNAKEELI RWEEGKKWQA |
| 1921 | KIEGIRNKLK EKEGEVFTLT KQLNTLKDLF AKADKEKLTL QRKLKTTGMT VDQVLGIRAL |
| 1981 | ESEKELEELK KRNLDLENDI LYMRAHQALP RDSVVEDLHL QNRYLQEKLH ALEKQFSKDT |
| 2041 | YSKPSQNQIS GIESDDHCQR EQELQKENLK LSSENIELKF QLEQANKDLP RLKNQVRDLK |
| 2101 | EMCEFLKKEK AEVQRKLGHV RGSGRSGKTI PELEKTIGLM KKVVEKVQRE NEQLKKASGI |
| 2161 | LTSEKMANIE QENEKLKAEL EKLKAHLGHQ LSMHYESKTK GTEKIIAENE RLRKELKKET |
| 2221 | DAAEKLRIAK NNLEILNEKM TVQLEETGKR LQFAESRGPQ LEGADSKSWK SIVVTRMYET |
| 2281 | KLKELETDIA KKNQSITDLK QLVKEATERE QKVNKYNEDL EQQIKILKHV PEGAETEQGL |
| 2341 | KRELQVLRLA NHQLDKEKAE LIHQIEANKD QSGAESTIPD ADQLKEKIKD LETQLKMSDL |
| 2401 | EKQHLKEEIK KLKKELENFD PSFFEEIEDL KYNYKEEVKK NILLEEKVKK LSEQLGVELT |
| 2461 | SPVAASEEFE DEEESPVNFP IY |

SEQ ID NO: 73
CENTROSOMAL PROTEIN 290 (CEP290), ISOFORM X11
XP_016875472.1

| | |
|---|---|
| 1 | MPPNINWKEI MKVDPDDLPR QEELADNLLI SLSKVEVNEL KSEKQENVIH LFRITQSLMK |
| 61 | MKAQEVELAL EEVEKAGEEQ AKFENQLKTK VMKLENELEM AQQSAGGRDT RFLRNEICQL |
| 121 | EKQLEQKDRE LEDMEKELEK EKKVNEQLAL RNEEAENENS KLRRENEQLC QDIIDYQKQI |
| 181 | DSQKETLLSR RGEDSDYRSQ LSKKNYELIQ YLDEIQTLTE ANEKIEVQNQ EMRKNLEESV |
| 241 | QEMEKMTDEY NRMKAIVHQT DNVIDQLKKE NDHYQLQVQE LTDLLKSKNE EDDPIMVAVN |
| 301 | AKVEEWKLIL SSKDDEIIEY QQMLHNLREK LKNAQLDADK SNVMALQQGI QERDSQIKML |
| 361 | TEQVEQYTKE MEKNTCIIED LKNELQRNKG ASTLSQQTHM KIQSTLDILK EKTKEAERTA |
| 421 | ELAEADAREK DKELVEALKR LKDYESGVYG LEDAVVEIKN CKNQIKIRDR EIEILTKEIN |
| 481 | KLELKISDFL DENEALRERV GLEPKTMIDL TEFRNSKHLK QQQYRAENQI LLKEIESLEE |
| 541 | ERLDLKKKIR QMAQERGKRS ATSGLTTEDL NLTENISQGD RISERKLDLL SLKNMSEAQS |
| 601 | KNEFLSRELI EKERDLERSR TVIAKFQNKL KELVEENKQL EEGMKEILQA IKEMQKDPDV |
| 661 | KGGETSLIIP SLERLVNAIE SKNAEGIFDA SLHLKAQVDQ LTGRNEELRQ ELRESRKEAI |
| 721 | NYSQQLAKAN LKIDHLEKET SLLRQSEGSN VVFKGIDLPD GIAPSSASII NSQNEYLIHL |
| 781 | LQELENKEKK LKNLEDSLED YNRKFAVIRH QQSLLYKEYL SEKETWKTES KTIKEEKRKL |
| 841 | EDQVQQDAIK VKEYNNLLNA LQMDSDEMKK ILAENSRKIT VLQVNEKSLI RQYTTLVELE |
| 901 | RQLRKENEKQ KNELLSMEAE VCEKIGCLQR FKEMAIFKIA ALQKVVDNSV SLSELELANK |
| 961 | QYNELTAKYR DILQKDNMLV QRTSNLEHLE CENISLKEQV ESINKELEIT KEKLHTIEQA |
| 1021 | WEQETKLGNE SSMDKAKKSI TNSDIVSISK KITMLEMKEL NERQRAEHCQ KMYEHLRTSL |
| 1081 | KQMEERNFEL ETKFAELTKI NLDAQKVEQM LRDELADSVS KAVSDADRQR ILELEKNEME |
| 1141 | LKVEVSKLRE ISDIARRQVE ILNAQQQSRD KEVESLRMQL LDYQAQSDEK SLIAKLHQHN |
| 1201 | VSLQLSEATA LGKLESITSK LQKMEAYNLR LEQKLDEKEQ ALYYARLEGR NRAKHLRQTI |
| 1261 | QSLRRQFSGA LPLAQQEKFS KTMIQLQNDK LKIMQEMKNS QQEHRNMENK TLEMELKLKG |
| 1321 | LEELISTLKD TKGAQKVINW HMKIEELRLQ ELKLNRELVK DKEEIKYLNN IISEYERTIS |
| 1381 | SLEEEIVQQN KFHEERQMAW DQREVDLERQ LDIFDRQQNE ILNAAQKFEE ATGSIPDPSL |
| 1441 | PLPNQLEIAL RKIKENIRII LETRATCKSL EEKLKEKESA LRLAEQNILS RDKVINELRL |
| 1501 | RLPATAEREK LIAELGRKEM EPKSHHTLKI AHQTIANMQA RLNQKEEVLK KYQRLLEKAR |
| 1561 | EEQREIVKKH EEDLHILHHR LELQADSSLN KFKQTAWDLM KQSPTPVPTN KHFIRLAEME |
| 1621 | QTVAEQDDSL SSLLVKLKKV SQDLERQREI TELKVKEFEN IKLQLQENHE DEVKKVKAEV |
| 1681 | EDLKYLLDQS QKESQCLKSE LQAQKEANSR APTTTMRNLV ERLKSQLALK EKQQKALSRA |
| 1741 | LLELRAEMTA AAEERIISAT SQKEAHLNVQ QIVDRHTREL KTQVEDLNEN LLKLKEALKT |
| 1801 | SKNRENSLTD NLNDLNNELQ KKQKAYNKIL REKEEIDQEN DELKRQIKRL TSGLQGKPLT |
| 1861 | DNKQSLIEEL QRKVKKLENQ LEGKVEEVDL KPMKEKNAKE ELIRWEEGKK WQAKIEGIRN |
| 1921 | KLKEKEGEVF TLTKQLNTLK DLFAKADKEK LTLQRKLKTT GMTVDQVLGI RALESEKELE |
| 1981 | ELKKRNLDLE NDILYMRAHQ ALPRDSVVED LHLQNRYLQE KLHALEKQFS KDTYSKPSQN |
| 2041 | QISGIESDDH CQREQELQKE NLKLSSENIE LKFQLEQANK DLPRLKNQVR DLKEMCEFLK |
| 2101 | KEKAEVQRKL GHVRGSGRSG KTIPELEKTI GLMKKVVEKV QRENEQLKKA SGILTSEKMA |
| 2161 | NIEQENEKLK AELEKLKAHL GHQLSMHYES KTKGTEKIIA ENERLRKELK KETDAAEKLR |
| 2221 | IAKNNLEILN EKMTVQLEET GKRLQFAESR GPQLEGADSK SWKSIVVTRM YETKLKELET |
| 2281 | DIAKKNQSIT DLKQLVKEAT EREQKVNKYN EDLEQQIKIL KHVPEGAETE QGLKRELQVL |
| 2341 | RLANHQLDKE KAELIHQIEA NKDQSGAEST IPDADQLKEK IKDLETQLKM SDLEKQHLKE |
| 2401 | EIKKLKKELE NFDPSFFEEI EDLKYNYKEE VKKNILLEEK VKKLSEQLGV ELTSPVAASE |
| 2461 | EFEDEEESPV NFPIY |

SEQ ID NO: 74
CENTROSOMAL PROTEIN 290 (CEP290), ISOFORM X12
XP_011537066.1

| | |
|---|---|
| 1 | MPPNINWKEI MKVDPDDLPR QEELADNLLI SLSKVEVNEL KSEKQENVIH LFRITQSLMK |
| 61 | MKAQEVELAL EEVEKAGEEQ AKFENQLKTK VMKLENELEM AQQSAGGRDT RFLRNEICQL |
| 121 | EKQLEQKDRE LEDMEKELEK EKKVNEQLAL RNEEAENENS KLRRENKRLK KKNEQLCQDI |
| 181 | IDYQKQIDSQ KETLLSRRGE DSDYRSQLSK KNYELIQYLD EIQTLTEANE KIEVQNQEMR |
| 241 | KNLEESVQEM EKMTDEYNRM KAIVHQTDNV IDQLKKENDH YQLQVQELTD LLKSKNEEDD |
| 301 | PIMVAVNAKV EEWKLILSSK DDEIIEYQQM LHNLREKLKN AQLDADKSNV MALQQGIQER |
| 361 | DSQIKMLTEQ VEQYTKEMEK NTCIIEDLKN ELQRNKGAST LSQQTHMKIQ STLDILKEKT |
| 421 | KEAERTAELA EADAREKDKE LVEALKRLKD YESGVYGLED AVVEIKNCKN QIKIRDREIE |
| 481 | ILTKEINKLE LKISDFLDEN EALRERVGLE PKTMIDLTEF RNSKHLKQQQ YRAENQILLK |
| 541 | EIESLEEERL DLKKKIRQMA QERGKRSATS GLTTEDLNLT ENISQGDRIS ERKLDLLSLK |
| 601 | NMSEAQSKIR SSDKAELLHR RSSFNTPQSD QNETEENMTI GSLSRMLSEI HHSVESGMHP |
| 661 | FVPLTRLSSS MQVKENSTPE TITIREIFKA PCLQSSRNLE SLVSTFSRES HEEINDICLF |
| 721 | SDDCMKKVSR SHQALEKTSF VQKSNSSFHG LSTASDIMQK LSLRQKSAIF CQQIHENRAD |
| 781 | MDKSQVATLE EEQVHSQVKY ADINLKEDII KSEVPLQTEI LKNKLKVNLP DPVSITAQSK |
| 841 | LSQINSLENL IEQLRRELVF LRSQNEIIAQ EFLIKEAECR NADIELEHHR SQAEQNEFLS |
| 901 | RELIEKERDL ERSRTVIAKF QNKLKELVEE NKQLEEGMKE ILQAIKEMQK DPDVKGGETS |
| 961 | LIIPSLERLV NAIESKNAEG IFDASLHLKA QVDQLTGRNE ELRQELRESR KEAINYSQQL |
| 1021 | AKANLKIDHL EKETSLLRQS EGSNVVFKGI DLPDGIAPSS ASIINSQNEY LIHLLQELEN |
| 1081 | KEKKLKNLED SLEDYNRKFA VIRHQQSLLY KEYLSEKETW KTESKTIKEE KRKLEDQVQQ |
| 1141 | DAIKVKEYNN LLNALQMDSD EMKKILAENS RKITVLQVNE KSLIRQYTTL VELERQLRKE |
| 1201 | NEKQKNELLS MEAEVCEKIG CLQRFKEMAI FKIAALQKVV DNSVSLSELE LANKQYNELT |
| 1261 | AKYRDILQKD NMLVQRTSNL EHLECENISL KEQVESINKE LEITKEKLHT IEQAWEQETK |
| 1321 | LGNESSMDKA KKSITNSDIV SISKKITMLE MKELNERQRA EHCQKMYEHL RTSLKQMEER |
| 1381 | NFELETKFAE LTKINLDAQK VEQMLRDELA DSVSKAVSDA DRQRILELEK NEMELKVEVS |
| 1441 | KLREISDIAR RQVEILNAQQ QSRDKEVESL RMQLLDYQAQ SDEKSLIAKL HQHNVSLQLS |
| 1501 | EATALGKLES ITSKLQKMEA YNLRLEQKLD EKEQALYYAR LEGRNRAKHL RQTIQSLRRQ |
| 1561 | FSGALPLAQQ EKFSKTMIQL QNDKLKIMQE MKNSQQEHRN MENKTLEMEL KLKGLEELIS |
| 1621 | TLKDTKGAQK VINWHMKIEE LRLQELKLNR ELVKDKEEIK YLNNIISEYE RTISSLEEEI |
| 1681 | VQQNKFHEER QMAWDQREVD LERQLDIFDR QQNEILNAAQ KFEEATGSIP DPSLPLPNQL |
| 1741 | EIALRKIKEN IRIILETRAT CKSLEEKLKE KESALRLAEQ NILSRDKVIN ELRLRLPATA |
| 1801 | EREKLIAELG RKEMEPKSHH TLKIAHQTIA NMQARLNQKE EVLKKYQRLL EKAREEQREI |
| 1861 | VKKHEEDLHI LHHRLELQAD SSLNKFKQTA WDLMKQSPTP VPTNKHFIRL AEMEQTVAEQ |
| 1921 | DDSLSSLLVK LKKVSQDLER QREITELKVK EFENIKLQLQ ENHEDEVKKV KAEVEDLKYL |
| 1981 | LDQSQKESQC LKSELQAQKE ANSRAPTTTM RNLVERLKSQ LALKEKQQKA LSRALLELRA |
| 2041 | EMTAAAEERI ISATSQKEAH LNVQQIVDRH TRELKTQVED LNENLLKLKE ALKTSKNREN |
| 2101 | SLTDNLNDLN NELQKKQKAY NKILREKEEI DQENDELKRQ IKRLTSGLQG KPLTDNKQSL |
| 2161 | IEELQRKVKK LENQLEGKVE EVDLKPMKEK NAKEELIRWE EGKKWQAKIE GIRNKLKEKE |
| 2221 | GEVFTLTKQL NTLKDLFAKA DKEKLTLQRK LKTTGMTVDQ VLGIRALESE KELEELKKRN |
| 2281 | LDLENDILYM RAHQALPRDS VVEDLHLQNR YLQEKLHALE KQFSKDTYSK PSQNQDTSHS |
| 2341 | RIGFTLKSHF NLNTSVKTQS PNKVTF |

SEQ ID NO: 75
CENTROSOMAL PROTEIN 290 (CEP290), ISOFORM X13
XP_011537067.1

| | |
|---|---|
| 1 | MPPNINWKEI MKVDPDDLPR QEELADNLLI SLSKVEVNEL KSEKQENVIH LFRITQSLMK |
| 61 | MKAQEVELAL EEVEKAGEEQ AKFENQLKTK VMKLENELEM AQQSAGGRDT RFLRNEICQL |
| 121 | EKQLEQKDRE LEDMEKELEK EKKVNEQLAL RNEEAENENS KLRRENKRLK KKNEQLCQDI |
| 181 | IDYQKQIDSQ KETLLSRRGE DSDYRSQLSK KNYELIQYLD EIQTLTEANE KIEVQNQEMR |
| 241 | KNLEESVQEM EKMTDEYNRM KAIVHQTDNV IDQLKKENDH YQLQVQELTD LLKSKNEEDD |
| 301 | PIMVAVNAKV EEWKLILSSK DDEIIEYQQM LHNLREKLKN AQLDADKSNV MALQQGIQER |
| 361 | DSQIKMLTEQ VEQYTKEMEK NTCIIEDLKN ELQRNKGAST LSQQTHMKIQ STLDILKEKT |
| 421 | KEAERTAELA EADAREKDKE LVEALKRLKD YESGVYGLED AVVEIKNCKN QIKIRDREIE |
| 481 | ILTKEINKLE LKISDFLDEN EALRERVGLE PKTMIDLTEF RNSKHLKQQQ YRAENQILLK |
| 541 | EIESLEEERL DLKKKIRQMA QERGKRSATS GLTTEDLNLT ENISQGDRIS ERKLDLLSLK |
| 601 | NMSEAQSKIR SSDKAELLHR RSSFNTPQSD QNETEENMTI GSLSRMLSEI HHSVESGMHP |
| 661 | FVPLTRLSSS MQVKENSTPE TITIREIFKA PCLQSSRNLE SLVSTFSRES HEEINDICLF |
| 721 | SDDCMKKVSR SHQALEKTSF VQKSNSSFHG LSTASDIMQK LSLRQKSAIF CQQIHENRAD |
| 781 | MDKSQVATLE EEQVHSQVKY ADINLKEDII KSEVPLQTEI LKNKLKVNLP DPVSITAQSK |
| 841 | LSQINSLENL IEQLRRELVF LRSQNEIIAQ EFLIKEAECR NADIELEHHR SQAEQNEFLS |
| 901 | RELIEKERDL ERSRTVIAKF QNKLKELVEE NKQLEEGMKE ILQAIKEMQK DPDVKGGETS |
| 961 | LIIPSLERLV NAIESKNAEG IFDASLHLKA QVDQLTGRNE ELRQELRESR KEAINYSQQL |
| 1021 | AKANLKIDHL EKETSLLRQS EGSNVVFKGI DLPDGIAPSS ASIINSQNEY LIHLLQELEN |
| 1081 | KEKKLKNLED SLEDYNRKFA VIRHQQSLLY KEYLSEKETW KTESKTIKEE KRKLEDQVQQ |
| 1141 | DAIKVKEYNN LLNALQMDSD EMKKILAENS RKITVLQVNE KSLIRQYTTL VELERQLRKE |
| 1201 | NEKQKNELLS MEAEVCEKIG CLQRFKEMAI FKIAALQKVV DNSVSLSELE LANKQYNELT |
| 1261 | AKYRDILQKD NMLVQRTSNL EHLECENISL KEQVESINKE LEITKEKLHT IEQAWEQETK |
| 1321 | LGNESSMDKA KKSITNSDIV SISKKITMLE MKELNERQRA EHCQKMYEHL RTSLKQMEER |
| 1381 | NFELETKFAE LTKINLDAQK VEQMLRDELA DSVSKAVSDA DRQRILELEK NEMELKVEVS |
| 1441 | KLREISDIAR RQVEILNAQQ QSRDKEVESL RMQLLDYQAQ SDEKSLIAKL HQHNVSLQLS |
| 1501 | EATALGKLES ITSKLQKMEA YNLRLEQKLD EKEQALYYAR LEGRNRAKHL RQTIQSLRRQ |
| 1561 | FSGALPLAQQ EKFSKTMIQL QNDKLKIMQE MKNSQQEHRN MENKTLEMEL KLKGLEELIS |
| 1621 | TLKDTKGAQK VINWHMKIEE LRLQELKLNR ELVKDKEEIK YLNNIISEYE RTISSLEEEI |
| 1681 | VQQNKFHEER QMAWDQREVD LERQLDIFDR QQNEILNAAQ KFEEATGSIP DPSLPLPNQL |
| 1741 | EIALRKIKEN IRIILETRAT CKSLEEKLKE KESALRLAEQ NILSRDKVIN ELRLRLPATA |
| 1801 | EREKLIAELG RKEMEPKSHH TLKIAHQTIA NMQARLNQKE EVLKKYQRLL EKAREEQREI |
| 1861 | VKKHEEDLHI LHHRLELQAD SSLNKFKQTA WDLMKQSPTP VPTNKHFIRL AEMEQTVAEQ |
| 1921 | DDSLSSLLVK LKKVSQDLER QREITELKVK EFENIKLQLQ ENHEDEVKKV KAEVEDLKYL |
| 1981 | LDQSQKESQC LKSELQAQKE ANSRAPTTTM RNLVERLKSQ LALKEKQQKA LSRALLELRA |
| 2041 | EMTAAAEERI ISATSQKEAH LNVQQIVDRH TRELKTQVED LNENLLKLKE ALKTSKNREN |
| 2101 | SLTDNLNDLN NELQKKQKAY NKILREKEEI DQENDELKRQ IKRLTSGLQG KPLTDNKQSL |
| 2161 | IEELQRKVKK LENQLEGKVE EVDLKPMKEK NAKEELIRWE EGKKWQAKIE GIRNKLKEKE |
| 2221 | GEVFTLTKQL NTLKDLFAKA DKEKLTLQRK LKTTGMTVDQ VLGIRALESE KELEELKKRN |
| 2281 | LDLENDILYM RAHQALPRDS VVEDLHLQNR YLQEKLHALE KQFSKDTYSK PSNQDTSHSR |
| 2341 | IGFTLKSHFN LNTSVKTQSP NKVTF |

SEQ ID NO: 76
CENTROSOMAL PROTEIN 290 (CEP290), ISOFORM X14
XP_011537068.1

| | |
|---|---|
| 1 | MIDLTEFRNS KHLKQQQYRA ENQILLKEIE SLEEERLDLK KKIRQMAQER GKRSATSGLT |
| 61 | TEDLNLTENI SQGDRISERK LDLLSLKNMS EAQSKIRSSD KAELLHRRSS FNTPQSDQNE |
| 121 | TEENMTIGSL SRMLSEIHHS VESGMHPFVP LTRLSSSMQV KENSTPETIT IREIFKAPCL |
| 181 | QSSRNLESLV STFSRESHEE INDICLFSDD CMKKVSRSHQ ALEKTSFVQK SNSSFHGLST |
| 241 | ASDIMQKLSL RQKSAIFCQQ IHENRADMDK SQVATLEEEQ VHSQVKYADI NLKEDIIKSE |
| 301 | VPLQTEILKN KLKVNLPDPV SITAQSKLSQ INSLENLIEQ LRRELVFLRS QNEIIAQEFL |
| 361 | IKEAECRNAD IELEHHRSQA EQNEFLSREL IEKERDLERS RTVIAKFQNK LKELVEENKQ |
| 421 | LEEGMKEILQ AIKEMQKDPD VKGGETSLII PSLERLVNAI ESKNAEGIFD ASLHLKAQVD |
| 481 | QLTGRNEELR QELRESRKEA INYSQQLAKA NLKIDHLEKE TSLLRQSEGS NVVFKGIDLP |
| 541 | DGIAPSSASI INSQNEYLIH LLQELENKEK KLKNLEDSLE DYNRKFAVIR HQQSLLYKEY |
| 601 | LSEKETWKTE SKTIKEEKRK LEDQVQQDAI KVKEYNNLLN ALQMDSDEMK KILAENSRKI |
| 661 | TVLQVNEKSL IRQYTTLVEL ERQLRKENEK QKNELLSMEA EVCEKIGCLQ RFKEMAIFKI |
| 721 | AALQKVVDNS VSLSELELAN KQYNELTAKY RDILQKDNML VQRTSNLEHL ECENISLKEQ |
| 781 | VESINKELEI TKEKLHTIEQ AWEQETKLGN ESSMDKAKKS ITNSDIVSIS KKITMLEMKE |
| 841 | LNERQRAEHC QKMYEHLRTS LKQMEERNFE LETKFAELTK INLDAQKVEQ MLRDELADSV |
| 901 | SKAVSDADRQ RILELEKNEM ELKVEVSKLR EISDIARRQV EILNAQQQSR DKEVESLRMQ |
| 961 | LLDYQAQSDE KSLIAKLHQH NVSLQLSEAT ALGKLESITS KLQKMEAYNL RLEQKLDEKE |
| 1021 | QALYYARLEG RNRAKHLRQT IQSLRRQFSG ALPLAQQEKF SKTMIQLQND KLKIMQEMKN |
| 1081 | SQQEHRNMEN KTLEMELKLK GLEELISTLK DTKGAQKVIN WHMKIEELRL QELKLNRELV |
| 1141 | KDKEEIKYLN NIISEYERTI SSLEEEIVQQ NKFHEERQMA WDQREVDLER QLDIFDRQQN |
| 1201 | EILNAAQKFE EATGSIPDPS LPLPNQLEIA LRKIKENIRI ILETRATCKS LEEKLKEKES |
| 1261 | ALRLAEQNIL SRDKVINELR LRLPATAERE KLIAELGRKE MEPKSHHTLK IAHQTIANMQ |
| 1321 | ARLNQKEEVL KKYQRLLEKA REEQREIVKK HEEDLHILHH RLELQADSSL NKFKQTAWDL |
| 1381 | MKQSPTPVPT NKHFIRLAEM EQTVAEQDDS LSSLLVKLKK VSQDLERQRE ITELKVKEFE |
| 1441 | NIKLQLQENH EDEVKKVKAE VEDLKYLLDQ SQKESQCLKS ELQAQKEANS RAPTITMRNL |
| 1501 | VERLKSQLAL KEKQQKALSR ALLELRAEMT AAAEERIISA TSQKEAHLNV QQIVDRHTRE |
| 1561 | LKTQVEDLNE NLLKLKEALK TSKNRENSLT DNLNDLNNEL QKKQKAYNKI LREKEEIDQE |
| 1621 | NDELKRQIKR LTSGLQGKPL TDNKQSLIEE LQRKVKKLEN QLEGKVEEVD LKPMKEKNAK |
| 1681 | EELIRWEEGK KWQAKIEGIR NKLKEKEGEV FTLTKQLNTL KDLFAKADKE KLTLQRKLKT |
| 1741 | TGMTVDQVLG IRALESEKEL EELKKRNLDL ENDILYMRAH QALPRDSVVE DLHLQNRYLQ |
| 1801 | EKLHALEKQF SKDTYSKPSQ NQISGIESDD HCQREQELQK ENLKLSSENI ELKFQLEQAN |
| 1861 | KDLPRLKNQV RDLKEMCEFL KKEKAEVQRK LGHVRGSGRS GKTIPELEKT IGLMKKVVEK |
| 1921 | VQRENEQLKK ASGILTSEKM ANIEQENEKL KAELEKLKAH LGHQLSMHYE SKTKGTEKII |
| 1981 | AENERLRKEL KKETDAAEKL RIAKNNLEIL NEKMTVQLEE TGKRLQFAES RGPQLEGADS |
| 2041 | KSWKSIVVTR MYETKLKELE TDIAKKNQSI TDLKQLVKEA TEREQKVNKY NEDLEQQIKI |
| 2101 | LKHVPEGAET EQGLKRELQV LRLANHQLDK EKAELIHQIE ANKDQSGAES TIPDADQLKE |
| 2161 | KIKDLETQLK MSDLEKQHLK EEIKKLKKEL ENFDPSFFEE IEDLKYNYKE EVKKNILLEE |
| 2221 | KVKKLSEQLG VELTSPVAAS EEFEDEEESP VNFPIY |

SEQ ID NO: 77
INOSINE MONOPHOSPHATE DEHYDROGENASE 1 (IMPDH1)
EAL24310.1

| | |
|---|---|
| 1 | MEGPLTPPPL QGGGAAAVPE PGARQHPGHE TAAQRYSARL LQAGYEPESP RLDLATHPTT |
| 61 | PRSELSSVVL LAGVGVQMDR LRRASMADYL ISGGTGYVPE DGLTAQQLFA SADGLTYNDF |
| 121 | LILPGFIDFI ADEVDLTSAL TRKITLKTPL ISSPMDTVTE ADMAIAMALM GGIGFIHHNC |
| 181 | TPEFQANEVR KVKKFEQGFI TDPVVLSPSH TVGDVLEAKM RHGFSGIPIT ETGTMGSKLV |
| 241 | GIVTSRDIDF LAEKDHTTLL SEVMTPRIEL VVAPAGVTLK EANEILQRSK KGKLPIVNDC |
| 301 | DELVAIIART DLKKNRDYPL ASKDSQKQLL CGAAVGTRED DKYRLDLLTQ AGVDVIVLDS |
| 361 | SQGNSVYQIA MVHYIKQKYP HLQVIGGNVV TAAQAKNLID AGVDGLRVGM GCGSICITQE |
| 421 | VMACGRPQGT AVYKVAEYAR RFGVPIIADG GIQTVGHVVK ALALGASTVM MGSLLAATTE |
| 481 | APGEYFFSDG VRLKKYRGMG SLDAMEKSSS SQKRYFSEGD KVKIAQGVSG SIQDKGSIQK |
| 541 | FVPYLIAGIQ HGCQDIGARS LSVLRSMMYS GELKFEKRTM SAQIEGGVHG LHSYEKRLY |

SEQ ID NO: 78
INOSINE MONOPHOSPHATE DEHYDROGENASE 1 (IMPDH1)
AAH33622.2

| | |
|---|---|
| 1 | MEGPLTPPPL QGGGAAAVPE PGARQHPGHE TAAQRYSARL LQAGYEPESM ADYLISGGTG |
| 61 | YVPEDGLTAQ QLFASADGLT YNDFLILPGF IDFIADEVDL TSALTRKITL KTPLISSPMD |
| 121 | TVTEADMAIA MALMGGIGFI HHNCTPEFQA NEVRKVKKFE QGFITDPVVL SPSHTVGDVL |
| 181 | EAKMRHGFSG IPITETGTMG SKLVGIVTSR DIDFLAEKDH TTLLSEVMTP RIELVVAPAG |
| 241 | VTLKEANEIL QRSKKGKLPI VNDCDELVAI IARTDLKKNR DYPLASKDSQ KQLLCGAAVG |
| 301 | TREDDKYRLD LLTQAGVDVI VLDSSQGNSV YQIAMVHYIK QKYPHLQVIG GNVVTAAQAK |
| 361 | NLIDAGVDGL RVGMGCGSIC ITQEVMACGR PQGTAVYKVA EYARRFGVPI IADGGIQTVG |
| 421 | HVVKALALGA STVMMGSLLA ATTEAPGEYF FSDGVRLKKY RGMGSLDAME KSSSSQKRYF |
| 481 | SEGDKVKIAQ GVSGSIQDKG SIQKFVPYLI AGIQHGCQDI GARSLSVLRS MMYSGELKFE |
| 541 | KRTMSAQIEG GVHGLHSYEK RLY |

SEQ ID NO: 79
INOSINE MONOPHOSPHATE DEHYDROGENASE 1 (IMPDH1), ISOFORM CRA_A
EAW83649.1

| | |
|---|---|
| 1 | MEGPLTPPPL QGGGAAAVPE PGARQHPGHE TAAQRYSARL LQAGYEPESM ADYLISGGTG |
| 61 | YVPEDGLTAQ QLFASADGLT YNDFLILPGF IDFIADEVDL TSALTRKITL KTPLISSPMD |
| 121 | TVTEADMAIA MALMGGIGFI HHNCTPEFQA NEVRKKFEQG FITDPVVLSP SHTVGDVLEA |
| 181 | KMRHGFSGIP ITETGTMGSK LVGIVTSRDI DFLAEKDHTT LLSEVMTPRI ELVVAPAGVT |
| 241 | LKEANEILQR SKKGKLPIVN DCDELVAIIA RTDLKKNRDY PLASKDSQKQ LLCGAAVGTR |
| 301 | EDDKYRLDLL TQAGVDVIVL DSSQGNSVYQ IAMVHYIKQK YPHLQVIGGN VVTAAQAKNL |
| 361 | IDAGVDGLRV GMGCGSICIT QEVMACGRPQ GTAVYKVAEY ARRFGVPIIA DGGIQTVGHV |
| 421 | VKALALGAST VMMGSLLAAT TEAPGEYFFS DGVRLKKYRG MGSLDAMEKS SSSQKRYFSE |
| 481 | GDKVKIAQGV SGSIQDKGSI QKFVPYLIAG IQHGCQDIGA RSLSVLRSMM YSGELKFEKR |
| 541 | TMSAQIEGGV HGLHSYEKRL Y |

SEQ ID NO: 80
INOSINE MONOPHOSPHATE DEHYDROGENASE 1 (IMPDH1), ISOFORM CRA_B
EAW83650.1

| | |
|---|---|
| 1 | MDRLRRASMA DYLISGGTGY VPEDGLTAQQ LFASADGLTY NDFLILPGFI DFIADEVDLT |
| 61 | SALTRKITLK TPLISSPMDT VTEADMAIAM AKFEQGFITD PVVLSPSHTV GDVLEAKMRH |
| 121 | GFSGIPITET GTMGSKLVGI VTSRDIDFLA EKDHTTLLSE VMTPRIELVV APAGVTLKEA |
| 181 | NEILQRSKKG KLPIVNDCDE LVAIIARTDL KKNRDYPLAS KDSQKQLLCG AAVGTREDDK |
| 241 | YRLDLLTQAG VDVIVLDSSQ GNSVYQIAMV HYIKQKYPHL QVIGGNVVTA AQAKNLIDAG |
| 301 | VDGLRVGMGC GSICITQEVM ACGRPQGTAV YKVAEYARRF GVPIIADGGI QTVGHVVKAL |
| 361 | ALGASTVMMG SLLAATTEAP GEYFFSDGVR LKKYRGMGSL DAMEKSSSSQ KRYFSEGDKV |
| 421 | KIAQGVSGSI QDKGSIQKFV PYLIAGIQHG CQDIGARSLS VLRSMMYSGE LKFEKRTMSA |
| 481 | QIEGGVHGLH SYEKRLY |

SEQ ID NO: 81
INOSINE MONOPHOSPHATE DEHYDROGENASE 1 (IMPDH1), ISOFORM CRA_C
EAW83651.1

| | |
|---|---|
| 1 | MRHGFSGIPI TETGTMGSKL VGIVTSRDID FLAEKDHTTL LSEVMTPRIE LVVAPAGVTL |
| 61 | KEANEILQRS KKGKLPIVND CDELVAIIAR TDLKKNRDYP LASKDSQKQL LCGAAVGTRE |
| 121 | DDKYRLDLLT QAGVDVIVLD SSQGNSVYQI AMVHYIKQKY PHLQVIGGNV VTAAQAKNLI |
| 181 | DAGVDGLRVG MGCGSICITQ EVMACGRPQG TAVYKVAEYA RRFGVPIIAD GGIQTVGHVV |
| 241 | KALALGASTV MMGSLLAATT EAPGEYFFSD GVRLKKYRGM GSLDAMEKSS SSQKRYFSEG |
| 301 | DKVKIAQGVS GSIQDKGSIQ KFVPYLIAGI QHGCQDIGAR SLSVLRSMMY SGELKFEKRT |
| 361 | MSAQIEGGVH GLHSYEKRLY |

SEQ ID NO: 82
INOSINE MONOPHOSPHATE DEHYDROGENASE 1 (IMPDH1), ISOFORM CRA_D
EAW83652.1

| | |
|---|---|
| 1 | MDRLRRASMA DYLISGGTGY VPEDGLTAQQ LFASADGLTY NDFLILPGFI DFIADEVDLT |
| 61 | SALTRKITLK TPLISSPMDT VTEADMAIAM ALMGGIGFIH HNCTPEFQAN EVRKVKKFEQ |
| 121 | GFITDPVVLS PSHTVGDVLE AKMRHGFSGI PITETGTMGS KLVGIVTSRD IDFLAEKDHT |
| 181 | TLLSEVMTPR IELVVAPAGV TLKEANEILQ RSKKGKLPIV NDCDELVAII ARTDLKKNRD |
| 241 | YPLASKDSQK QLLCGAAVGT REDDKYRLDL LTQAGVDVIV LDSSQGNSVY QIAMVHYIKQ |
| 301 | KYPHLQVIGG NVVTAAQAKN LIDAGVDGLR VGMGCGSICI TQEVMACGRP QGTAVYKVAE |
| 361 | YARRFGVPII ADGGIQTVGH VVKALALGAS TVMMGSLLAA TTEAPGEYFF SDGVRLKKYR |
| 421 | GMGSLDAMEK SSSSQKRYFS EGDKVKIAQG VSGSIQDKGS IQKFVPYLIA GIQHGCQDIG |
| 481 | ARSLSVLRSM MYSGELKFEK RTMSAQIEGG VHGLHSYEKR LY |

SEQ ID NO: 83
RETINAL DEGENERATION 3, GUCY2D REGULATOR (RD3)
NP_001158160.1

| | |
|---|---|
| 1 | MSLISWLRWN EAPSRLSTRS PAEMVLETLM MELTGQMREA ERQQRERSNA VRKVCTGVDY |
| 61 | SWLASTPRST YDLSPIERLQ LEDVCVKIHP SYCGPAILRF RQLLAEQEPE VQEVSQLFRS |
| 121 | VLQEVLERMK QEEEAHKLTR QWSLRPRGSL ATFKTRARIS PFASDIRTIS EDVERDTPPP |
| 181 | LRSWSMPEFR APKAD |

SEQ ID NO: 84
RETINOL DEHYDROGENASE 12 (RDH12)
Q96NR8.3

| | |
|---|---|
| 1 | MLVTLGLLTS FFSFLYMVAP SIRKFFAGGV CRTNVQLPGK VVVITGANTG IGKETARELA |
| 61 | SRGARVYIAC RDVLKGESAA SEIRVDTKNS QVLVRKLDLS DTKSIRAFAE GFLAEEKQLH |
| 121 | ILINNAGVMM CPYSKTADGF ETHLGVNHLG HFLLTYLLLE RLKVSAPARV VNVSSVAHHI |
| 181 | GKIPFHDLQS EKRYSRGFAY CHSKLANVLF TRELAKRLQG TGVTTYAVHP GVVRSELVRH |
| 241 | SSLLCLLWRL FSPFVKTARE GAQTSLHCAL AEGLEPLSGK YFSDCKRTWV SPRARNNKTA |
| 301 | ERLWNVSCEL LGIRWE |

SEQ ID NO: 85
RETINOL DEHYDROGENASE 12 (RDH12), ISOFORM 1, PARTIAL
ALQ34323.1

| | |
|---|---|
| 1 | MLVTLGLLTS FFSFLYMVAP SIRKFFAGGV CRTNVQLPGK VVVITGANTG IGKETARELA |
| 61 | SRGARVYIAC RDVLKGESAA SEIRVDTKNS QVLVRKLDLS DTKSIRAFAE GFLAEEKQLH |
| 121 | ILINNAGVMM CPYSKTADGF ETHLGVNHLG HFLLTYLLLE RLKVSAPARV VNVSSVAHHI |
| 181 | GKIPFHDLQS EKRYSRGFAY CHSKLANVLF TRELAKRLQG TGVTTYAVHP GVVRSELVRH |
| 241 | SSLLCLLWRL FSPFVKTARE GAQTSLHCAL AEGLEPLSGK YFSDCKRTWV SPRARNNKTA |
| 301 | ERLWNVSCEL LGIRWE |

SEQ ID NO: 86
RETINOL DEHYDROGENASE 12 (RDH12), ISOFORM 4, PARTIAL
ALQ34324.1

| | |
|---|---|
| 1 | MLVTLGLLTS FFSFLYMVAP SIRKFFAGGV CRTNVQLPGK VVVITGANTG IGKETARELA |
| 61 | SRGARVYIAC RDVLKGESAA SEIRVDTKNS QVLVRKLDLS DTKSIRAFAE GFLAEEKQLH |
| 121 | ILINNAGVMM CPYSKTADGF ETHLGVNHLG TGVTTYAVHP GVVRSELVRH SSLLCLLWRL |
| 181 | FSPFVKTARE GAQTSLHCAL AEGLEPLSGK YFSDCKRTWV SPRARNNKTA ERLWNVSCEL |
| 241 | LGIRWE |

SEQ ID NO: 87
RETINOL DEHYDROGENASE 12 (RDH12), PRECURSOR
NP_689656.2

| | |
|---|---|
| 1 | MLVTLGLLTS FFSFLYMVAP SIRKFFAGGV CRTNVQLPGK VVVITGANTG IGKETARELA |
| 61 | SRGARVYIAC RDVLKGESAA SEIRVDTKNS QVLVRKLDLS DTKSIRAFAE GFLAEEKQLH |
| 121 | ILINNAGVMM CPYSKTADGF ETHLGVNHLG HFLLTYLLLE RLKVSAPARV VNVSSVAHHI |
| 181 | GKIPFHDLQS EKRYSRGFAY CHSKLANVLF TRELAKRLQG TGVTTYAVHP GVVRSELVRH |
| 241 | SSLLCLLWRL FSPFVKTARE GAQTSLHCAL AEGLEPLSGK YFSDCKRTWV SPRARNNKTA |
| 301 | ERLWNVSCEL LGIRWE |

SEQ ID NO: 88
LECITHIN RETINOL ACYLTRANSFERASE (LRAT)
AAD13529.1

| | |
|---|---|
| 1 | MKNPMLEVVS LLLEKLLLIS NFTLFSSGAA GKDKGRNSFY ETSSFHRGDV LEVPRTHLTH |
| 61 | YGIYLGDNRV AHMMPDILLA LTDDMGRTQK VVSNKRLILG VIVKVASIRV DTVEDFAYGA |
| 121 | NILVNHLDES LQKKALLNEE VARRAEKLLG FTPYSLLWNN CEHFVTYCRY GTPISPQSDK |
| 181 | FCETVKIIIR DQRSVLASAV LGLASIVCTG LVSYTTLPAI FIPFFLWMAG |

SEQ ID NO: 89
TUBBY LIKE PROTEIN 1 (TULP1)
AAB97966.1

| | |
|---|---|
| 1 | MPLRDETLRE VWASDSGHEE ESLSPEAPRR PKQRPAPAQR LRKKRTEAPE SPCPTGSKPR |
| 61 | KPGAGRRGRP REEPSPDPAQ ARAPQTVYAR FLRDPEAKKR DPRETFLVAR APDAEDEEEE |
| 121 | EEEDEEDEEE EAEEKKEKIL LPPKKPLREK SSADLKERRA KAQGPRGDLG SPDPPPKPLR |
| 181 | VRNKEAPAGE GTKMRKTKKK GSGEADKDPS GSPASARKSP AAMFLVGEGS PDKKALKKKG |
| 241 | TPKGARKEEE EEEEAATVIK NSNQKGKAKG KGKKKAKEER APSPPVEVDE PREFVLRPAP |
| 301 | QGRTVRCRLT RDKKGMDRGM YPSYFLHLDT EKKVFLLAGR KRKRSKTANY LISIDPTNLS |
| 361 | RGGENFIGKL RSNLLGNRFT VFDNGQNPQR GYSTNVASLR QELAAVIYET NVLGFRGPRR |
| 421 | MTVIIPGMSA ENERVPIRPR NASDGLLVRW QNKTLESLIE LHNKPPVWND DSGSYTLNFQ |
| 481 | GRVTQASVKN FQIVHADDPD YIVLQFGRVA EDAFTLDYRY PLCALQAFAI ALSSFDGKLA |
| 541 | CE |

SEQ ID NO: 90
TUBBY LIKE PROTEIN 1 (TULP1), ISOFORM CRA_A
EAX03839.1

| | |
|---|---|
| 1 | MPLRDETLRE VWASDSGHEE ESLSPEAPRR PKQRPAPAQR LRKKRTEAPE SPCPTGSKPR |
| 61 | KPGEEEEEEE DEEDEEEEAE EKKEKILLPP KKPLREKSSA DLKERRAKAQ GPRGDLGSPD |
| 121 | PPPKPLRVRN KEAPAGEGTK MRKTKKKGSG EADKDPSGSP ASARKSPAAM FLVGEGSPDK |
| 181 | KALKKKGTPK GARKEEEEEE EAATVIKNSN QKGKAKGKGK KKEERAPSPP VEVDEPREFV |
| 241 | LRPAPQGRTV RCRLTRDKKG MDRGMYPSYF LHLDTEKKVF LLAGRKRKRS KTANYLISID |
| 301 | PTNLSRGGEN FIGKLRSNLL GNRFTVFDNG QNPQRGYSTN VASLRQELAA VIYETNVLGF |
| 361 | RGPRRMTVII PGMSAENERV PIRPRNASDG LLVRWQNKTL ESLIELHNKP PVWNDDSGSY |
| 421 | TLNFQGRVTQ ASVKNFQIVH ADDPDYIVLQ FGRVAEDAFT LDYRYPLCAL QAFAIALSSF |
| 481 | DGKLACE |

SEQ ID NO: 91
TUBBY LIKE PROTEIN 1 (TULP1), ISOFORM CRA_B
EAX03840.1

| | |
|---|---|
| 1 | MPLRDETLRE VWASDSGHEE ESLSPEAPRR PKQRPAPAQR LRKKRTEAPE SPCPTGSKPR |
| 61 | KPGAGRRGRP REEPSPDPAQ ARAPQTVYAR FLRDPEAKKR DPRETFLVAR APDAEDEEEE |
| 121 | EEEDEEDEEE EAEEKKEKIL LPPKKPLREK SSADLKERRA KAQGPRGDLG SPDPPPKPLR |
| 181 | VRNKEAPAGE GTKMRKTKKK GSGEADKDPS GSPASARKSP AAMFLVGEGS PDKKALKKKG |
| 241 | TPKGARKEEE EEEEAATVIK NSNQKGKAKG KGKKKEERAP SPPVEVDEPR EFVLRPAPQG |
| 301 | RTVRCRLTRD KKGMDRGMYP SYFLHLDTEK KVFLLAGRKR KRSKTANYLI SIDPTNLSRG |
| 361 | GENFIGKLRS NLLGNRFTVF DNGQNPQRGY STNVASLRQE LAAVIYETNV LGFRGPRRMT |
| 421 | VIIPGMSAEN ERVPIRPRNA SDGLLVRWQN KTLESLIELH NKPPVWNDDS GSYTLNFQGR |
| 481 | VTQASVKNFQ IVHADDPDYI VLQFGRVAED AFTLDYRYPL CALQAFAIAL SSFDGKLACE |

SEQ ID NO: 92
TUBBY LIKE PROTEIN 1 (TULP1), HOMOLOG ISOFORM A
NP_003311.2

| | |
|---|---|
| 1 | MGARTPLPSF WVSFFAETGI LFPGGTPWPM GSQHSKQHRK PGPLKRGHRR DRRTTRRKYW |
| 61 | KEGREIARVL DDEGRNLRQQ KLDRQRALLE QKQKKKRQEP LMVQANADGR PRSRRARQSE |
| 121 | EQAPLVESYL SSSGSTSYQV QEADSLASVQ LGATRPTAPA SAKRTKAAAT AGGQGGAARK |
| 181 | EKKGKHKGTS GPAALAEDKS EAQGPVQILT VGQSDHAQDA GETAAGGGER PSGQDLRATM |
| 241 | QRKGISSSMS FDEDEEDEEE NSSSSSQLNS NTRPSSATSR KSVREAASAP SPTAPEQPVD |
| 301 | VEVQDLEEFA LRPAPQGITI KCRITRDKKG MDRGMYPTYF LHLDREDGKK VFLLAGRKRK |
| 361 | KSKTSNYLIS VDPTDLSRGG DSYIGKLRSN LMGTKFTVYD NGVNPQKASS STLESGTLRQ |
| 421 | ELAAVCYETN VLGFKGPRKM SVIVPGMNMV HERVSIRPRN EHETLLARWQ NKNTESIIEL |
| 481 | QNKTPVWNDD TQSYVLNFHG RVTQASVKNF QIIHGNDPDY IVMQFGRVAE DVFTMDYNYP |
| 541 | LCALQAFAIA LSSFDSKLAC E |

SEQ ID NO: 93
TUBBY LIKE PROTEIN 1 (TULP1)
NP_813977.1

| | |
|---|---|
| 1 | MTSKPHSDWI PYSVLDDEGR NLRQQKLDRQ RALLEQKQKK KRQEPLMVQA NADGRPRSRR |
| 61 | ARQSEEQAPL VESYLSSSGS TSYQVQEADS LASVQLGATR PTAPASAKRT KAAATAGGQG |
| 121 | GAARKEKKGK HKGTSGPAAL AEDKSEAQGP VQILTVGQSD HAQDAGETAA GGGERPSGQD |
| 181 | LRATMQRKGI SSSMSFDEDE EDEEENSSSS SQLNSNTRPS SATSRKSVRE AASAPSPTAP |
| 241 | EQPVDVEVQD LEEFALRPAP QGITIKCRIT RDKKGMDRGM YPTYFLHLDR EDGKKVFLLA |
| 301 | GRKRKKSKTS NYLISVDPTD LSRGGDSYIG KLRSNLMGTK FTVYDNGVNP QKASSSTLES |
| 361 | GTLRQELAAV CYETNVLGFK GPRKMSVIVP GMNMVHERVS IRPRNEHETL LARWQNKNTE |
| 421 | SIIELQNKTP VWNDDTQSYV LNFHGRVTQA SVKNFQIIHG NDPDYIVMQF GRVAEDVFTM |
| 481 | DYNYPLCALQ AFAIALSSFD SKLACE |

SEQ ID NO: 94
POTASSIUM VOLTAGE-GATED CHANNEL SUBFAMILY J MEMBER 13 (KCNJ13)
O60928.1

| | |
|---|---|
| 1 | MDSSNCKVIA PLLSQRYRRM VTKDGHSTLQ MDGAQRGLAY LRDAWGILMD MRWRWMMLVF |
| 61 | SASFVVHWLV FAVLWYVLAE MNGDLELDHD APPENHTICV KYITSFTAAF SFSLETQLTI |
| 121 | GYGTMFPSGD CPSAIALLAI QMLLGLMLEA FITGAFVAKI ARPKNRAFSI RFTDTAVVAH |
| 181 | MDGKPNLIFQ VANTRPSPLT SVRVSAVLYQ ERENGKLYQT SVDFHLDGIS SDECPFFIFP |
| 241 | LTYYHSITPS SPLATLLQHE NPSHFELVVF LSAMQEGTGE ICQRRTSYLP SEIMLHHCFA |
| 301 | SLLTRGSKGE YQIKMENFDK TVPEFPTPLV SKSPNRTDLD IHINGQSIDN FQISETGLTE |

SEQ ID NO: 95
POTASSIUM VOLTAGE-GATED CHANNEL SUBFAMILY J MEMBER 13 (KCNJ13)
AAH37290.1

| | |
|---|---|
| 1 | MDSSNCKVIA PLLSQRYRRM VTKDGHSTLQ MDGAQRGLAY LRDAWGILMD MRWRWMMLVF |
| 61 | SASFVVHWLV FAVLWYVLAE MNGDLELDHD APPENHTICV KYITSFTAAF SFSLETQLTI |
| 121 | GYGTMFPSGD CPSAIALLAI QMLLGLMLEA FITGAFVAKI ARPKNRAFSI RFTDIAVVAH |
| 181 | MDGKPNLIFQ VANTRPSPLT SVRVSAVLYQ ERENGKLYQT SVDFHLDGIS SDECPFFIFP |
| 241 | LTYYHSITPS SPLATLLQHE NPSHFELVVF LSAMQEGTGE ICQRRTSYLQ SEIMLHHCFA |
| 301 | SLLTRGSKCE YQIKMENFDK TVPEFPTPLV SKSPNRTDLD IHINGQSIDN FQISETGLTE |

SEQ ID NO: 96
MITOCHONDRIALLY ENCODED NADH DEHYDROGENASE 1 (MT-ND1)
P03886.1

| | |
|---|---|
| 1 | MPMANLLLLI VPILIAMAFL MLTERKILGY MQLRKGPNVV GPYGLLQPFA DAMKLFTKEP |
| 61 | LKPATSTITL YITAPTLALT IALLLWTPLP MPNPLVNLNL GLLFILATSS LAVYSILWSG |
| 121 | WASNSNYALI GALRAVAQTI SYEVTLAIIL LSTLLMSGSF NLSTLITTQE HLWLLLPSWP |
| 181 | LAMMWFISTL AETNRTPFDL AEGESELVSG FNIEYAAGPF ALFFMAEYTN IIMMNTLTTT |
| 241 | IFLGTTYDAL SPELYTTYFV TKTLLLTSLF LWIRTAYPRF RYDQLMHLLW KNFLPLTLAL |
| 301 | LMWYVSMPIT ISSIPPQT |

SEQ ID NO: 97
MITOCHONDRIALLY ENCODED NADH DEHYDROGENASE 4 (MT-ND4)
ACT53103.1

| | |
|---|---|
| 1 | MLKLIVPTIM LLPLTWLSKK HMIWINTTTH SLIISIIPLL FFNQINNNLF SCSPTFSSDP |
| 61 | LTTPLLMLTT WLLPLTIMAS QRHLSSEPLS RKKLYLSMLI SLQISLIMTF TATELIMFYI |
| 121 | FFETTLIPTL AIITRWGNQP ERLNAGTYFL FYTLVGSLPL LIALIYTHNT LGSLNILLLT |
| 181 | LTAQELSNSW ANNLMWLAYT MAFMVKMPLY GLHLWLPKAH VEAPIAGSMV LAAVLLKLGG |
| 241 | YGMMRLTLIL NPLTKHMAYP FLVLSLWGMI MTSSICLRQT DLKSLIAYSS ISHMALVVTA |
| 301 | ILIQTPWSFT GAVILMIAHG LTSSLLFCLA NSNYERTHSR IMILSQGLQT LLPLMAFWWL |
| 361 | LASLANLALP PTINLLGELS VLVTTFSWSN ITLLLTGLNM LVTALYSLYM FTTTQWGSLT |
| 421 | HHINNMKPSF TRENTLMFMH LSPILLLSLN PDIITGFSS |

SEQ ID NO: 98
MITOCHONDRIALLY ENCODED NADH DEHYDROGENASE 6 (MT-ND6)
ACT53105.1

| | |
|---|---|
| 1 | MMYALFLLSV GLVMGFVGFS SKPSPIYGGL VLIVSGVVGC VIILNFGGGY MGLMVFLIYL |
| 61 | GGMMVVFGYT TAMAIEEYPE AWGSGVEVLV SVLVGLAMEV GLVLWVKEYD GVVVVVNFNS |
| 121 | VGSWMIYEGE GSGLIREDPI GAGALYDYGR WLVVVTGWTL FVGVYIVIEI ARGN |

SEQ ID NO: 99
ANGIOTENSIN I CONVERTING ENZYME (ACE)
P12821.1

| | |
|---|---|
| 1 | MGAASGRRGP GLLLPLPLLL LLPPQPALAL DPGLQPGNFS ADEAGAQLFA QSYNSSAEQV |
| 61 | LFQSVAASWA HDTNITAENA RRQEEAALLS QEFAEAWGQK AKELYEPIWQ NFTDPQLRRI |
| 121 | IGAVRTLGSA NLPLAKRQQY NALLSNMSRI YSTAKVCLPN KTATCWSLDP DLTNILASSR |
| 181 | SYAMLLFAWE GWHNAAGIPL KPLYEDFTAL SNEAYKQDGF TDTGAYWRSW YNSPTFEDDL |
| 241 | EHLYQQLEPL YLNLHAFVRR ALHRRYGDRY INLRGPIPAH LLGDMWAQSW ENIYDMVVPF |
| 301 | PDKPNLDVTS TMLQQGWNAT HMFRVAEEFF TSLELSPMPP EFWEGSMLEK PADGREVVCH |
| 361 | ASAWDFYNRK DFRIKQCTRV TMDQLSTVHH EMGHIQYYLQ YKDLPVSLRR GANPGFHEAI |
| 421 | GDVLALSVST PEHLHKIGLL DRVTNDTESD INYLLKMALE KIAFLPFGYL VDQWRWGVFS |
| 481 | GRTPPSRYNF DWWYLRTKYQ GICPPVTRNE THFDAGAKFH VPNVTPYIRY FVSFVLQFQF |
| 541 | HEALCKEAGY EGPLHQCDIY RSTKAGAKLR KVLQAGSSRP WQEVLKDMVG LDALDAQPLL |
| 601 | KYFQPVTQWL QEQNQQNGEV LGWPEYQWHP PLPDNYPEGI DLVTDEAEAS KFVEEYDRTS |
| 661 | QVVWNEYAEA NWNYNTNITT ETSKILLQKN MQIANHTLKY GTQARKFDVN QLQNTTIKRI |
| 721 | IKKVQDLERA ALPAQELEEY NKILLDMETT YSVATVCHPN GSCLQLEPDL TNVMATSRKY |
| 781 | EDLLWAWEGW RDKAGRAILQ FYPKYVELIN QAARLNGYVD AGDSWRSMYE TPSLEQDLER |
| 841 | LFQELQPLYL NLHAYVRRAL HRHYGAQHIN LEGPIPAHLL GNMWAQTWSN IYDLVVPFPS |
| 901 | APSMDTTEAM LKQGWTPRRM FKEADDFFTS LGLLPVPPEF WNKSMLEKPT DGREVVCHAS |
| 961 | AWDFYNGKDF RIKQCTTVNL EDLVVAHHEM GHIQYFMQYK DLPVALREGA NPGFHEAIGD |
| 1021 | VLALSVSTPK HLHSLNLLSS EGGSDEHDIN FLMKMALDKI AFIPFSYLVD QWRWRVFDGS |
| 1081 | ITKENYNQEW WSLRLKYQGL CPPVPRTQGD FDPGAKFHIP SSVPYIRYFV SFIIQFQFHE |
| 1141 | ALCQAAGHTG PLHKCDIYQS KEAGQRLATA MKLGFSRPWP EAMQLITGQP NMSASAMLSY |
| 1201 | FKPLLDWLRT ENELHGEKLG WPQYNWTPNS ARSEGPLPDS GRVSFLGLDL DAQQARVGQW |
| 1261 | LLLFLGIALL VATLGLSQRL FSIRHRSLHR HSHGPQFGSE VELRHS |

SEQ ID NO: 100
ANGIOTENSIN I CONVERTING ENZYME (ACE), ISOFORM 1 PRECURSOR
NP_000780.1

| | |
|---|---|
| 1 | MGAASGRRGP GLLLPLPLLL LLPPQPALAL DPGLQPGNFS ADEAGAQLFA QSYNSSAEQV |
| 61 | LFQSVAASWA HDTNITAENA RRQEEAALLS QEFAEAWGQK AKELYEPIWQ NFTDPQLRRI |
| 121 | IGAVRTLGSA NLPLAKRQQY NALLSNMSRI YSTAKVCLPN KTATCWSLDP DLTNILASSR |
| 181 | SYAMLLFAWE GWHNAAGIPL KPLYEDFTAL SNEAYKQDGF TDTGAYWRSW YNSPTFEDDL |
| 241 | EHLYQQLEPL YLNLHAFVRR ALHRRYGDRY INLRGPIPAH LLGDMWAQSW ENIYDMVVPF |
| 301 | PDKPNLDVTS TMLQQGWNAT HMFRVAEEFF TSLELSPMPP EFWEGSMLEK PADGREVVCH |
| 361 | ASAWDFYNRK DFRIKQCTRV TMDQLSTVHH EMGHIQYYLQ YKDLPVSLRR GANPGFHEAI |
| 421 | GDVLALSVST PEHLHKIGLL DRVTNDTESD INYLLKMALE KIAFLPFGYL VDQWRWGVFS |
| 481 | GRTPPSRYNF DWWYLRTKYQ GICPPVTRNE THFDAGAKFH VPNVTPYIRY FVSFVLQFQF |
| 541 | HEALCKEAGY EGPLHQCDIY RSTKAGAKLR KVLQAGSSRP WQEVLKDMVG LDALDAQPLL |
| 601 | KYFQPVTQWL QEQNQQNGEV LGWPEYQWHP PLPDNYPEGI DLVTDEAEAS KFVEEYDRTS |
| 661 | QVVWNEYAEA NWNYNTNITT ETSKILLQKN MQIANHTLKY GTQARKFDVN QLQNTTIKRI |
| 721 | IKKVQDLERA ALPAQELEEY NKILLDMETT YSVATVCHPN GSCLQLEPDL TNVMATSRKY |
| 781 | EDLLWAWEGW RDKAGRAILQ FYPKYVELIN QAARLNGYVD AGDSWRSMYE TPSLEQDLER |
| 841 | LFQELQPLYL NLHAYVRRAL HRHYGAQHIN LEGPIPAHLL GNMWAQTWSN IYDLVVPFPS |
| 901 | APSMDTTEAM LKQGWTPRRM FKEADDFFTS LGLLPVPPEF WNKSMLEKPT DGREVVCHAS |
| 961 | AWDFYNGKDF RIKQCTTVNL EDLVVAHHEM GHIQYFMQYK DLPVALREGA NPGFHEAIGD |
| 1021 | VLALSVSTPK HLHSLNLLSS EGGSDEHDIN FLMKMALDKI AFIPFSYLVD QWRWRVFDGS |
| 1081 | ITKENYNQEW WSLRLKYQGL CPPVPRTQGD FDPGAKFHIP SSVPYIRYFV SFIIQFQFHE |
| 1141 | ALCQAAGHTG PLHKCDIYQS KEAGQRLATA MKLGFSRPWP EAMQLITGQP NMSASAMLSY |
| 1201 | FKPLLDWLRT ENELHGEKLG WPQYNWTPNS ARSEGPLPDS GRVSFLGLDL DAQQARVGQW |
| 1261 | LLLFLGIALL VATLGLSQRL FSIRHRSLHR HSHGPQFGSE VELRHS |

SEQ ID NO: 101
ANGIOTENSIN I CONVERTING ENZYME (ACE), ISOFORM 2 PRECURSOR
NP_690043.1

| | |
|---|---|
| 1 | MGQGWATAGL PSLLFLLLCY GHPLLVPSQE ASQQVTVTHG TSSQATTSSQ TTTHQATAHQ |
| 61 | TSAQSPNLVT DEAEASKFVE EYDRTSQVVW NEYAEANWNY NTNITTETSK ILLQKNMQIA |
| 121 | NHTLKYGTQA RKFDVNQLQN TTIKRIIKKV QDLERAALPA QELEEYNKIL LDMETTYSVA |
| 181 | TVCHPNGSCL QLEPDLTNVM ATSRKYEDLL WAWEGWRDKA GRAILQFYPK YVELINQAAR |
| 241 | LNGYVDAGDS WRSMYETPSL EQDLERLFQE LQPLYLNLHA YVRRALHRHY GAQHINLEGP |
| 301 | IPAHLLGNMW AQTWSNIYDL VVPFPSAPSM DTTEAMLKQG WTPRRMFKEA DDFFTSLGLL |
| 361 | PVPPEFWNKS MLEKPTDGRE VVCHASAWDF YNGKDFRIKQ CTTVNLEDLV VAHHEMGHIQ |
| 421 | YFMQYKDLPV ALREGANPGF HEAIGDVLAL SVSTPKHLHS LNLLSSEGGS DEHDINFLMK |
| 481 | MALDKIAFIP FSYLVDQWRW RVFDGSITKE NYNQEWWSLR LKYQGLCPPV PRTQGDFDPG |
| 541 | AKFHIPSSVP YIRYFVSFII QFQFHEALCQ AAGHTGPLHK CDIYQSKEAG QRLATAMKLG |
| 601 | FSRPWPEAMQ LITGQPNMSA SAMLSYFKPL LDWLRTENEL HGEKLGWPQY NWTPNSARSE |
| 661 | GPLPDSGRVS FLGLDLDAQQ ARVGQWLLLF LGIALLVATL GLSQRLFSIR HRSLHRHSHG |
| 721 | PQFGSEVELR HS |

SEQ ID NO: 102
INTERLEUKIN 10 (IL10)
CAG46790.1

| | |
|---|---|
| 1 | MHSSALLCCL VLLTGVRASP GQGTQSENSC THFPGNLPNM LRDLRDAFSR VKTFFQMKDQ |
| 61 | LDNLLLKESL LEDFKGYLGC QALSEMIQFY LEEVMPQAEN QDPDIKAHVN SLGENLKTLR |
| 121 | LRLRRCHRFL PCENKSKAVE QVKNAFNKLQ EKGIYKAMSE FDIFINYIEA YMTMKIRN |

SEQ ID NO: 103
RAB ESCORT PROTEIN 1 (CHM)
EAW98559.1

| | |
|---|---|
| 1 | MADTLPSEFD VIVIGTGLPE SIIAAACSRS GRRVLHVDSR SYYGGNWASF SFSGLLSWLK |
| 61 | EYQENSDIVS DSPVWQDQIL ENEEAIALSR KDKTIQHVEV FCYASQDLHE DVEEAGALQK |
| 121 | NHALVTSANS TEAADSAFLP TEDESLSTMS CEMLTEQTPS SDPENALEVN GAEVTGEKEN |
| 181 | HCDDKTCVPS TSAEDMSENV PIAEDTTEQP KKNRITYSQI IKEGRRFNID LVSKLLYSRG |
| 241 | LLIDLLIKSN VSRYAEFKNI TRILAFREGR VEQVPCSRAD VFNSKQLTMV EKRMLMKFLT |
| 301 | FCMEYEKYPD EYKGYEEITF YEYLKTQKLT PNLQYIVMHS IAMTSETASS TIDGLKATKN |
| 361 | FLHCLGRYGN TPFLFPLYGQ GELPQCFCRM CAVFGGIYCL RHSVQCLVVD KESRKCKAII |
| 421 | DQFGQRIISE HFLVEDSYFP ENMCSRVQYR QISRAVLITD RSVLKTDSDQ QISILTVPAE |
| 481 | EPGTFAVRVI ELCSSTMTCM KGTYLVHLTC TSSKTAREDL ESVVQKLFVP YTEMEIENEQ |
| 541 | VEKPRILWAL YFNMRDSSDI SRSCYNDLPS NVYVCSGPDC GLGNDNAVKQ AETLFQEICP |
| 601 | NEDFCPPPPN PEDIILDGDS LQPEASESSA IPEANSETFK ESTNLGNLEE SSE |

SEQ ID NO: 104
RETINOSCHISIN (RS1)
NP_000321.1

| | |
|---|---|
| 1 | MSRKIEGFLL LLLFGYEATL GLSSTEDEGE DPWYQKACKC DCQGGPNALW SAGATSLDCI |
| 61 | PECPYHKPLG FESGEVTPDQ ITCSNPEQYV GWYSSWTANK ARLNSQGFGC AWLSKFQDSS |
| 121 | QWLQIDLKEI KVISGILTQG RCDIDEWMTK YSVQYRTDER LNWIYYKDQT GNNRVFYGNS |
| 181 | DRTSTVQNLL RPPIISRFIR LIPLGWHVRI AIRMELLECV SKCA |

SEQ ID NO: 105
RETINOSCHISIN (RS1), PARTIAL
ABK40506.1

| | |
|---|---|
| 1 | VFYGNSDRTS TVQNLLRPPI ISRFIRLIPL GCHVRIAIRM ELLECVSKCA |

SEQ ID NO: 106
BARDET-BIEDL SYNDROME 1 (BBS1)
AAM92770.1

| | |
|---|---|
| 1 | MAAASSSDSD ACGAESNEAN SKWLDAHYDP MANIHTFSAC LALADLHGDG EYKLVVGDLG |
| 61 | PGGQQPRLKV LKGPLVMTES PLPALPAAAA TFLMEQHEPR TPALALASGP CVYVYKNLRP |
| 121 | YFKFSLPQLP PNPLEQDLWN QAKEDRIDPL TLKEMLESIR ETAEEPLSIQ SLRFLQLELS |
| 181 | EMEAFVNQHK SNSIKRQTVI TTMTTLKKNL ADEDAVSCLV LGTENKELLV LDPEAFTILA |
| 241 | KMSLPSVPVF LEVSGQFDVE FRLAAACRNG NIYILRRDSK HPKYCIELSA QPVGLIRVHK |
| 301 | VLVVGSTQDS LHGFTHKGKK LWTVQMPAAI LTMNLLEQHS RGLQAVMAGL ANGEVRIYRD |
| 361 | KALLNVIHTP DAVTSLCFGR YGREDNTLIM TTRGGGLIIK ILKRTAVFVE GGSEVGPPPA |
| 421 | QAMKLNVPRK TRLYVDQTLR EREAGTAMHR AFQTDLYLLR LRAARAYLQA LESSLSPLST |
| 481 | TAREPLKLHA VVQGLGPTFK LTLHLQNTST TRPVLGLLVC FLYNEALYSL PRAFFKVPLL |
| 541 | VPGLNYPLET FVESLSNKGI SDIIKVLVLR EGQSAPLLSA HVNMPGSEGL AAA |

SEQ ID NO: 107
BARDET-BIEDL SYNDROME 2 (BBS2)
AAH14140.1

| | |
|---|---|
| 1 | MLLPVFTLKL RHKISPRMVA IGRYDGTHPC LAAATQTGKV FIHNPHTRNQ HVSASRVFQS |
| 61 | PLESDVSLLN INQAVSCLTA GVLNPELGYD ALLVGTQTNL LAYDVYNNSD LFYREVADGA |
| 121 | NVVVLGTLGD ISSPLAIIGG NCALQGFNHE GSDLFWTVTG DNVNSLALCD FDGDGKKELL |
| 181 | VGSEDFDIRV FKEDEIVAEM TETEIVTSLC PMYGSRFGYA LSNGTVGVYD KTSRYWRIKS |
| 241 | KNHAMSIHAF DLNSDGVNEL ITGWSNGKVD ARSDRTGEVI FKDNFSSAIA GVVEGDYRMD |
| 301 | GHIQLICCSV DGEIRGYLPG TAEMRGNLMD TSAEQDLIRE LSQKKQNLLL ELRNYEENAK |
| 361 | AELASPLNEA DGHRGIIPAN TRLHTTLSVS LGNETQTAHT ELRISTSNDT IIRAVLIFAE |
| 421 | GIFTGESHVV HPSIHNLSSS ICIPIVPPKD VPVDLHLKAF VGYRSSTQFH VFESTRQLPR |
| 481 | FSMYALTSLD PASEPISYVN FTIAERAQRV VVWLGQNFLL PEDTHIQNAP FQVCFTSLRN |
| 541 | GGHLHIKIKL SGEITINTDD IDLAGDIIQS MASFFAIEDL QVEADFPVYF EELRKVLVKV |
| 601 | DEYHSVHQKL SADMADHSNL IRSLLVGAED ARLMRDMKTM KSRYMELYDL NRDLLNGYKI |
| 661 | RCNNHTELLG NLKAVNQAIQ RAGRLRVGKP KNQVITACRD AIRSNNINTL FKIMRVGTAS |
| 721 | S |

SEQ ID NO: 108
ADP RIBOSYLATION FACTOR LIKE GTPASE 6 (ARL6), ISOFORM BB3SL
NP_001310442.1

| | |
|---|---|
| 1 | MGLLDRLSVL LGLKKKEVHV LCLGLDNSGK TTIINKLKPS NAQSQNILPT IGFSIEKFKS |
| 61 | SSLSFTVFDM SGQGRYRNLW EHYYKEGQAI IFVIDSSDRL RMVVAKEELD TLLNHPDIKH |
| 121 | RRIPILFFAN KMDLRDAVTS VKVSQLLCLE NIKDKPWHIC ASDAIKGEGL QEGVDWLQEK |
| 181 | TIQSDPDCED MKR |

SEQ ID NO: 109
ADP RIBOSYLATION FACTOR LIKE GTPASE 6 (ARL6), ISOFORM 1
NP_001265222.1

| | |
|---|---|
| 1 | MGLLDRLSVL LGLKKKEVHV LCLGLDNSGK TTIINKLKPS NAQSQNILPT IGFSIEKFKS |
| 61 | SSLSFTVFDM SGQGRYRNLW EHYYKEGQAI IFVIDSSDRL RMVVAKEELD TLLNHPDIKH |
| 121 | RRIPILFFAN KMDLRDAVTS VKVSQLLCLE NIKDKPWHIC ASDAIKGEGL QEGVDWLQDQ |
| 181 | IQTVKT |

SEQ ID NO: 110
ADP RIBOSYLATION FACTOR LIKE GTPASE 6 (ARL6), ISOFORM 2
NP_001310443.1

| | |
|---|---|
| 1 | MGLLDRLSVL LGLKKKEVHV LCLGLDNSGK TTIINKLKPS NAQSQNILPT IGFSIEKFKS |
| 61 | SSLSFTVFDM SGQGRYRNLW EHYYKEGQAI IFVIDSSDRL RMVVAKEELD TLLNHPDIKH |
| 121 | RRIPILFFAN KMDLRDAVTS VKVSQLLCLE NIKDKPWHI |

SEQ ID NO: 111
BARDET-BIEDL SYNDROME 4 (BBS4)
AAH27624.1

| | |
|---|---|
| 1 | MAEERVATRT QFPVSTESQK PRQKKAPEFP ILEKQNWLIH LHYIRKDYEA CKAVIKEQLQ |
| 61 | ETQGLCEYAI YVQALIFRLE GNIQESLELF QTCAVLSPQS ADNLKQVARS LFLLGKHKAA |
| 121 | IEVYNEAAKL NQKDWEISHN LGVCYIYLKQ FNKAQDQLHN ALNLNRHDLT YIMLGKIHLL |
| 181 | EGDLDKAIEV YKKAVEFSPE NTELLTTLGL LYLQLGIYQK AFEHLGNALT YDPTNYKAIL |
| 241 | AAGSMMQTHG DFDVALTKYR VVACAVPESP PLWNNIGMCF FGKKKYVAAI SCLKRANYLA |
| 301 | PFDWKILYNL GLVHLTMQQY ASAFHFLSAA INFQPKMGEL YMLLAVALTN LEDTENAKRA |
| 361 | YAEAVHLDKC NPLVNLNYAV LLYNQGEKKN ALVQYQEMEK KVSLLKDNSS LEFDSEMVEM |
| 421 | AQKLGAALQV GEALVWTKPV KDPKSKHQTT STSKPASFQQ PLGSNQALGQ AMSSAAAYRT |
| 481 | LPSGAGGTSQ FTKPPSLPLE PEPAVESSPT ETSEQIREK |

SEQ ID NO: 112
BARDET-BIEDL SYNDROME 4 (BBS4), ISOFORM 1
NP_149017.2

| | |
|---|---|
| 1 | MAEERVATRT QFPVSTESQK PRQKKAPEFP ILEKQNWLIH LHYIRKDYEA CKAVIKEQLQ |
| 61 | ETQGLCEYAI YVQALIFRLE GNIQESLELF QTCAVLSPQS ADNLKQVARS LFLLGKHKAA |
| 121 | IEVYNEAAKL NQKDWEISHN LGVCYIYLKQ FNKAQDQLHN ALNLNRHDLT YIMLGKIHLL |
| 181 | EGDLDKAIEV YKKAVEFSPE NTELLTTLGL LYLQLGIYQK AFEHLGNALT YDPTNYKAIL |
| 241 | AAGSMMQTHG DFDVALTKYR VVACAVPESP PLWNNIGMCF FGKKKYVAAI SCLKRANYLA |
| 301 | PFDWKILYNL GLVHLTMQQY ASAFHFLSAA INFQPKMGEL YMLLAVALTN LEDIENAKRA |
| 361 | YAEAVHLDKC NPLVNLNYAV LLYNQGEKKN ALAQYQEMEK KVSLLKDNSS LEFDSEMVEM |
| 421 | AQKLGAALQV GEALVWTKPV KDPKSKHQTT STSKPASFQQ PLGSNQALGQ AMSSAAAYRT |
| 481 | LPSGAGGTSQ FTKPPSLPLE PEPAVESSPT ETSEQIREK |

SEQ ID NO: 113
BARDET-BIEDL SYNDROME 4 (BBS4), ISOFORM 2
NP_001239607.1

| | |
|---|---|
| 1 | MLGKIHLLEG DLDKAIEVYK KAVEFSPENT ELLTTLGLLY LQLGIYQKAF EHLGNALTYD |
| 61 | PTNYKAILAA GSMMQTHGDF DVALTKYRVV ACAVPESPPL WNNIGMCFFG KKKYVAAISC |
| 121 | LKRANYLAPF DWKILYNLGL VHLTMQQYAS AFHFLSAAIN FQPKMGELYM LLAVALTNLE |
| 181 | DIENAKRAYA EAVHLDKCNP LVNLNYAVLL YNQGEKKNAL AQYQEMEKKV SLLKDNSSLE |
| 241 | FDSEMVEMAQ KLGAALQVGE ALVWTKPVKD PKSKHQTTST SKPASFQQPL GSNQALGQAM |
| 301 | SSAAAYRTLP SGAGGTSQFT KPPSLPLEPE PAVESSPTET SEQIREK |

SEQ ID NO: 114
BARDET-BIEDL SYNDROME 4 (BBS4), ISOFORM 3
NP_001307594.1

| | |
|---|---|
| 1 | MAEERVATRT QFPVSTESQK PRQKKAPEFP ILEKQNWLIH LHYIRKDYEA CKAVIKEQLQ |
| 61 | ETQGLCEYAI YVQALIFRLE GNIQESLELF QTCAVLSPQS ADNLKQVARS LFLLGKHKAA |
| 121 | IEVYNEAAKL NQKDWEISHN LGVCYIYLKQ FNKAQDQLHN ALNLNRHDLT YIMLGKIHLL |
| 181 | EGDLDKAIEV YKKAVEFSPE NTELLTTLGL LYLQAILAAG SMMQTHGDFD VALTKYRVVA |
| 241 | CAVPESPPLW NNIGMCFFGK KKYVAAISCL KRANYLAPFD WKILYNLGLV HLTMQQYASA |
| 301 | FHFLSAAINF QPKMGELYML LAVALTNLED IENAKRAYAE AVHLDKCNPL VNLNYAVLLY |
| 361 | NQGEKKNALA QYQEMEKKVS LLKDNSSLEF DSEMVEMAQK LGAALQVGEA LVWTKPVKDP |
| 421 | KSKHQTTSTS KPASFQQPLG SNQALGQAMS SAAAYRTLPS GAGGTSQFTK PPSLPLEPEP |
| 481 | AVESSPTETS EQIREK |

SEQ ID NO: 115
BARDET-BIEDL SYNDROME 5 (BBS5)
NP_689597.1

| | |
|---|---|
| 1 | MSVLDALWED RDVRFDLSAQ QMKTRPGEVL IDCLDSIEDT KGNNGDRGRL LVTNLRILWH |
| 61 | SLALSRVNVS VGYNCILNIT TRTANSKLRG QTEALYILTK CNSTRFEFIF TNLVPGSPRL |
| 121 | FTSVMAVHRA YETSKMYRDF KLRSALIQNK QLRLLPQEHV YDKINGVWNL SSDQGNLGTF |
| 181 | FITNVRIVWH ANMNDSFNVS IPYLQIRSIK IRDSKFGLAL VIESSQQSGG YVLGFKIDPV |
| 241 | EKLQESVKEI NSLHKVYSAS PIFGVDYEME EKPQPLEALT VEQIQDDVEI DSDGHTDAFV |
| 301 | AYFADGNKQQ DREPVFSEEL GLAIEKLKDG FTLQGLWEVM S |

SEQ ID NO: 116
BARDET-BIEDL SYNDROME 5 (BBS5), ISOFORM 1
AAT08182.1

| | |
|---|---|
| 1 | MSVLDALWED RDVRFDLSAQ QMKTRPGEVL IDCLDSIEDT KGNNGDRGRL LVTNLRILWH |
| 61 | SLALSRVNVS VGYNCILNIT TRTANSKLRG QTEALYILTK CNSTRFEFIF TNLVPGSPRL |
| 121 | FTSVMAVHRA YETSKMYRDF KLRSALIQNK QLRLLPQEHV YDKINGVWNL SSDQGNLGTF |
| 181 | FITNVRIVWH ANMNDSFNVS IPYLQIRSIK IRDSKFGLAL VIESSQQSGG YVLGFKIDPV |
| 241 | EKLQESVKEI NSLHKVYSAS PIFGVDYEME EKPQPLEALT VEQIQDDVEI DSDGHTDAFV |
| 301 | AYFADGNKQQ DREPVFSEEL GLAIEKLKDG FTLQGLWEVM S |

SEQ ID NO: 117
BARDET-BIEDL SYNDROME 5 (BBS5), ISOFORM 2
AAT08183.1

| | |
|---|---|
| 1 | MSVLDALWED RDVRFDLSAQ QMKTRPGEVL IDCLDSIEDT KGNNGDRGRL LVTNLRILWH |
| 61 | SLALSRVNVS VGYNCILNIT TRTANSKLRG QTEALYILTK CNSTRFEFIF TNLVPGSPRL |
| 121 | FTSVMAVHRA YETSKMYRDF KLRSALIQNK QLRLLPQEHV YDKINGVWNL SSDQGNLGTF |
| 181 | FITNVRIVWH ANMNDSFNVS IPYLQISGGY VLGFKIDPVE KLQESVKEIN SLHKVYSASP |
| 241 | IFGVDYEMEE KPQPLEALTV EQIQDDVEID SDGHTDAFVA YFADGNKQQD REPVFSEELG |
| 301 | LAIEKLKDGF TLQGLWEVMS |

SEQ ID NO: 118
MCKUSICK-KAUFMAN SYNDROME (MKKS)
AAH28973.1

| | |
|---|---|
| 1 | MSRLEAKKPS LCKSEPLTTE RVRTTLSVLK RIVTSCYGPS GRLKQLHNGF GGYVCTTSQS |
| 61 | SALLSHLLVT HPILKILTAS IQNHVSSFSD CGLFTAILCC NLIENVQRLG LIPTIVIRLN |
| 121 | KHLLSLCISY LKSETCGCRI PVDFSSTQIL LCLVRSILTS KPACMLTRKE TEHVSALILR |
| 181 | AFLLTIPENA EGHIILGKSL IVPLKGQRVI DSTVLPGILI EMSEVQLMRL LPIKKSTALK |
| 241 | VALFCTTLSG DTSDTGEGTV VVSYGVSLEN AVLDQLLNLG RQLISDHVDL VLCQKVIHPS |
| 301 | LKQFLNMHRI IAIDRIGVTL MEPLTKMTGT QPIGSLGSIC PNSYGSVKDV CTAKFGSKHF |
| 361 | FHLIPNEATI CSLLLCNRND TAWDELKLTC QTALHVLQLT LKEPWALLGG GCTETHLAAY |
| 421 | IRHKTHNDPE SILKDDECTQ TELQLIAEAF CSALESVVGS LEHDGGEILT DMKYGHLWSV |
| 481 | QADSPCVANW PDLLSQCGCG LYNSQEELNW SFLRSTCRPF VPQSCLPHEA VVSASNLTLD |
| 541 | CLTAKLSGLQ VAVETANLIL DLSYVIEDKN |

SEQ ID NO: 119
MCKUSICK-KAUFMAN SYNDROME (MKKS), ISOFORM CRA_A
EAX10343.1

| | |
|---|---|
| 1 | MSLRNLWRDY KVLVVMVPLV GLIHLGWYRI KSSPVFQIPK NDDIPEQDSL GLSNLQKSQI |
| 61 | QGK |

SEQ ID NO: 120
MCKUSICK-KAUFMAN SYNDROME (MKKS), ISOFORM CRA_B
EAX10344.1

| | |
|---|---|
| 1 | MSRLEAKKPS LCKSEPLTTE RVRTTLSVLK RIVTSCYGPS GRLKQLHNGF GGYVCTTSQS |
| 61 | SALLSHLLVT HPILKILTAS IQNHVSSFSD CGLFTAILCC NLIENVQRLG LIPTIVIRLN |
| 121 | KHLLSLCISY LKSETCGCRI PVDFSSTQIL LCLVRSILTS KPACMLTRKE TEHVSALILR |
| 181 | AFLLTIPENA EGHIILGKSL IVPLKGQRVI DSTVLPGILI EMSEVQLMRL LPIKKSTALK |
| 241 | VALFCTTLSG DTSDTGEGTV VVSYGVSLEN AVLDQLLNLG RQLISDHVDL VLCQKVIHPS |
| 301 | LKQFLNMHRI IAIDRIGVTL MEPLTKMTGT QPIGSLGSIC PNSYGSVKDV CTAKFGSKHF |
| 361 | FHLIPNEATI CSLLLCNRND TAWDELKLTC QTALHVLQLT LKEPWALLGG GCTETHLAAY |
| 421 | IRHKTHNDPE SILKDDECTQ TELQLIAEAF CSALESVVGS LEHDGGEILT DMKYGHLWSV |
| 481 | QADSPCVANW PDLLSQCGCG LYNSQEELNW SFLRSTRRPF VPQSCLPHEA VGSASNLTLD |
| 541 | CLTAKLSGLQ VAVETANLIL DLSYVIEDKN |

SEQ ID NO: 121
BARDET-BIEDL SYNDROME 7 (BBS7)
AAH32691.1

| | |
|---|---|
| 1 | MDLILNRMDY LQVGVTSQKT MKLIPASRHR ATQKVVIGDH DGVVMCFGMK KGEAAAVFKT |
| 61 | LPGPKIARLE LGGVINTPQE KIFIAAASEI RGFTKRGKQF LSFETNLTES IKAMHISGSD |
| 121 | LFLSASYIYN HYCDCKDQHY YLSGDKINDV ICLPVERLSR ITPVLACQDR VLRVLQGSDV |
| 181 | MYAVEVPGPP TVLALHNGNG GDSGEDLLFG TSDGKLALIQ ITTSKPVRKW EIQNEKKRGG |
| 241 | ILCIDSFDIV GDGVKDLLVG RDDGMVEVYS FDNANEPVLR FDQMLSESVT SIQGGCVGKD |
| 301 | SYDEIVVSTY SGWVTGLTTE PIHKESGPGE ELKINQEMQN KISSLRNELE HLQYKVLQER |
| 361 | ENYQQSSQSS KAKSAVPSFG INDKFTLNKD DASYSLILEV QTAIDNVLIQ SDVPIDLLDV |
| 421 | DKNSAVVSFS SCDSESNDNF LLATYRCQAD TTRLELKIRS IEGQYGTLQA YVTPRIQPKT |
| 481 | CQVRQYHIKP LSLHQRTHFI DHDRPMNTLT LTGQFSFAEV HSWVVFCLPE VPEKPPAGEC |
| 541 | VTFYFQNTFL DTQLESTYRK GEGVFKSDNI STISILKDVL SKEATKRKIN LNISYEINEV |
| 601 | SVKHTLKLIH PKLEYQLLLA KKVQLIDALK ELQIHEGNTN FLIPEYHCIL EEADHLQEEY |
| 661 | KKQPAHLERL YG |

SEQ ID NO: 122
BARDET-BIEDL SYNDROME 7 (BBS7), ISOFORM A
NP_789794.1

| | |
|---|---|
| 1 | MDLILNRMDY LQVGVTSQKT MKLIPASRHR ATQKVVIGDH DGVVMCFGMK KGEAAAVFKT |
| 61 | LPGPKIARLE LGGVINTPQE KIFIAAASEI RGFTKRGKQF LSFETNLTES IKAMHISGSD |
| 121 | LFLSASYIYN HYCDCKDQHY YLSGDKINDV ICLPVERLSR ITPVLACQDR VLRVLQGSDV |
| 181 | MYAVEVPGPP TVLALHNGNG GDSGEDLLFG TSDGKLALIQ ITTSKPVRKW EIQNEKKRGG |
| 241 | ILCIDSFDIV GDGVKDLLVG RDDGMVEVYS FDNANEPVLR FDQMLSESVT SIQGGCVGKD |
| 301 | SYDEIVVSTY SGWVTGLTTE PIHKESGPGE ELKINQEMQN KISSLRNELE HLQYKVLQER |
| 361 | ENYQQSSQSS KAKSAVPSFG INDKFTLNKD DASYSLILEV QTAIDNVLIQ SDVPIDLLDV |
| 421 | DKNSAVVSFS SCDSESNDNF LLATYRCQAD TTRLELKIRS IEGQYGTLQA YVTPRIQPKT |
| 481 | CQVRQYHIKP LSLHQRTHFI DHDRPMNTLT LTGQFSFAEV HSWVVFCLPE VPEKPPAGEC |
| 541 | VTFYFQNTFL DTQLESTYRK GEGVFKSDNI STISILKDVL SKEATKRKIN LNISYEINEV |
| 601 | SVKHTLKLIH PKLEYQLLLA KKVQLIDALK ELQIHEGNTN FLIPEYHCIL EEADHLQEEY |
| 661 | KKQPAHLERL YGMITDLFID KFKFKGTNVK TKVPLLLEIL DSYDQNALIS FFDAA |

SEQ ID NO: 123
BARDET-BIEDL SYNDROME 7 (BBS7), ISOFORM B
NP_060660.2

| | |
|---|---|
| 1 | MDLILNRMDY LQVGVTSQKT MKLIPASRHR ATQKVVIGDH DGVVMCFGMK KGEAAAVFKT |
| 61 | LPGPKIARLE LGGVINTPQE KIFIAAASEI RGFTKRGKQF LSFETNLTES IKAMHISGSD |
| 121 | LFLSASYIYN HYCDCKDQHY YLSGDKINDV ICLPVERLSR ITPVLACQDR VLRVLQGSDV |
| 181 | MYAVEVPGPP TVLALHNGNG GDSGEDLLFG TSDGKLALIQ ITTSKPVRKW EIQNEKKRGG |
| 241 | ILCIDSFDIV GDGVKDLLVG RDDGMVEVYS FDNANEPVLR FDQMLSESVT SIQGGCVGKD |
| 301 | SYDEIVVSTY SGWVTGLTTE PIHKESGPGE ELKINQEMQN KISSLRNELE HLQYKVLQER |
| 361 | ENYQQSSQSS KAKSAVPSFG INDKFTLNKD DASYSLILEV QTAIDNVLIQ SDVPIDLLDV |
| 421 | DKNSAVVSFS SCDSESNDNF LLATYRCQAD TTRLELKIRS IEGQYGTLQA YVTPRIQPKT |
| 481 | CQVRQYHIKP LSLHQRTHFI DHDRPMNTLT LTGQFSFAEV HSWVVFCLPE VPEKPPAGEC |
| 541 | VTFYFQNTFL DTQLESTYRK GEGVFKSDNI STISILKDVL SKEATKRKIN LNISYEINEV |
| 601 | SVKHTLKLIH PKLEYQLLLA KKVQLIDALK ELQIHEGNTN FLIPEYHCIL EEADHLQEEY |
| 661 | KKQPAHLERL YG |

SEQ ID NO: 124
TETRATRICOPEPTIDE REPEAT DOMAIN 8 (TTC8)
AAH95433.1

| | |
|---|---|
| 1 | MSSEMEPLLL AWSYFRRRKF QLCADLCTQM LEKSPYDQAA WILKARALTE MVYIDEIDVD |
| 61 | QEGIAEMMLD ENAIAQVPRP GTSLKLPGTN QTGGPSQAVR PITQAGRPIT GFLRPSTQSG |
| 121 | RPGTMEQAIR TPRTAYTARP ITSSSGRFVR LGTASMLTSP DGPFINLSRL NLTKYSQKPK |
| 181 | LAKALFEYIF HHENDVKTAL DLAALSTEHS QYKDWWWKVQ IGKCYYRLGM YREAEKQFKS |
| 241 | ALKQQEMVDT FLYLAKVYVS LDQPVTALNL FKQGLDKFPG EVTLLCGIAR IYEEMNNMSS |
| 301 | AAEYYKEVLK QDNTHVEAIA CIGSNHFYSD QPEIALRFYR RLLQMGIYNG QLFNNLGLCC |
| 361 | FYAQQYDMTL TSFERALSLA ENEEEAADVW YNLGHVAVGI GDTNLAHQCF RLALVNNNNH |
| 421 | AEAYNNLAVL EMRKGHVEQA RALLQTASSL APHMYEPHFN FATISDKIGD LQRSYVAAQK |
| 481 | SEAAFPDHVD TQHLIKQLRQ HFAML |

SEQ ID NO: 125
TETRATRICOPEPTIDE REPEAT DOMAIN 8 (TTC8), ISOFORM A
NP_653197.2

| | |
|---|---|
| 1 | MSSEMEPLLL AWSYFRRRKF QLCADLCTQM LEKSPYDQEP DPELPVHQAA WILKARALTE |
| 61 | MVYIDEIDVD QEGIAEMMLD ENAIAQVPRP GTSLKLPGTN QTGGPSQAVR PITQAGRPIT |
| 121 | GFLRPSTQSG RPGTMEQAIR TPRTAYTARP ITSSSGRFVR LGTASMLTSP DGPFINLSRL |
| 181 | NLTKYSQKPK LAKALFEYIF HHENDVKTAL DLAALSTEHS QYKDWWWKVQ IGKCYYRLGM |
| 241 | YREAEKQFKS ALKQQEMVDT FLYLAKVYVS LDQPVTALNL FKQGLDKFPG EVTLLCGIAR |
| 301 | IYEEMNNMSS AAEYYKEVLK QDNTHVEAIA CIGSNHFYSD QPEIALRFYR RLLQMGIYNG |
| 361 | QLFNNLGLCC FYAQQYDMTL TSFERALSLA ENEEEAADVW YNLGHVAVGI GDTNLAHQCF |
| 421 | RLALVNNNNH AEAYNNLAVL EMRKGHVEQA RALLQTASSL APHMYEPHFN FATISDKIGD |
| 481 | LQRSYVAAQK SEAAFPDHVD TQHLIKQLRQ HFAML |

SEQ ID NO: 126
TETRATRICOPEPTIDE REPEAT DOMAIN 8 (TTC8), ISOFORM B
NP_938051.1

| | |
|---|---|
| 1 | MSSEMEPLLL AWSYFRRRKF QLCADLCTQM LEKSPYDQAA WILKARALTE MVYIDEIDVD |
| 61 | QEGIAEMMLD ENAIAQVPRP GTSLKLPGTN QTGGPSQAVR PITQAGRPIT GFLRPSTQSG |
| 121 | RPGTMEQAIR TPRTAYTARP ITSSSGRFVR LGTASMLTSP DGPFINLSRL NLTKYSQKPK |
| 181 | LAKALFEYIF HHENDVKTAL DLAALSTEHS QYKDWWWKVQ IGKCYYRLGM YREAEKQFKS |
| 241 | ALKQQEMVDT FLYLAKVYVS LDQPVTALNL FKQGLDKFPG EVTLLCGIAR IYEEMNNMSS |
| 301 | AAEYYKEVLK QDNTHVEAIA CIGSNHFYSD QPEIALRFYR RLLQMGIYNG QLFNNLGLCC |
| 361 | FYAQQYDMTL TSFERALSLA ENEEEAADVW YNLGHVAVGI GDTNLAHQCF RLALVNNNNH |
| 421 | AEAYNNLAVL EMRKGHVEQA RALLQTASSL APHMYEPHFN FATISDKIGD LQRSYVAAQK |
| 481 | SEAAFPDHVD TQHLIKQLRQ HFAML |

SEQ ID NO: 127
BARDET-BIEDL SYNDROME 9 (BBS9)
AAI03832.1

| | |
|---|---|
| 1 | MSLFKARDWW STILGDKEEF DQGCLCLANV DNSGNGQDKI IVGSFMGYLR IFSPHPAKTG |
| 61 | DGAQAEDLLL EVDLRDPVLQ VEVGKFVSGT EMLHLAVLHS RKLCVYSVSG TLGNVEHGNQ |
| 121 | CQMKLMYEHN LQRTACNMTY GSFGGVKGRD LICIQSMDGM LMVFEQESYA FGRFLPGFLL |
| 181 | PGPLAYSSRT DSFLTVSSCQ QVESYKYQVL AFATDADKRQ ETEQQKLGSG KRLVVDWTLN |
| 241 | IGEQALDICI VSFNQSASSV FVLGERNFFC LKDNGQIRFM KKLDWSPSCF LPYCSVSEGT |
| 301 | INTLIGNHNN MLHIYQDVTL KWATQLPHIP VAVRVGCLHD LKGVIVTLSD DGHLQCSYLG |
| 361 | TDPSLFQAPN VQSRELNYDE LDVEMKELQK IIKDVNKSQG VWPMTEREDD LNVSVVVSPN |
| 421 | FDSVSQATDV EVGTDLVPSV TVKVTLQNRV ILQKAKLSVY VQPPLELTCD QFTFEFMTPD |
| 481 | LTRTVSFSVY LKRSYTPSEL EGNAVVSYSR PTDRNPDGIP RVIQCKFRLP LKLICLPGQP |
| 541 | SKTASHKITI DTNKSPVSLL SLFPGFASQS DDDQVNVMGF HFLGGARITV LASKTSQRYR |
| 601 | IQSEQFEDLW LITNELILRL QEYFEKQGVK DFACSFSGSI PLQEYFELID HHFELRINGE |
| 661 | KLEELLSERA VQFRAIQRRL LARFKDKTPA PLQHLDTLLD GTYKQVIALA DAVEENQGNL |
| 721 | FQSFTRLKSA THLVILLIAL WQKLSADQVA ILEAAFLPLQ EDTQELGWEE TVDAAISHLL |
| 781 | KTCLSKSSKE QALNLNSQLN IPKDTSQLKK HITLLCDRLS KGGRLCLSTD AAAPQTMVMP |
| 841 | GGCTTIPESD LEERSVEQDS TELFTNHRHL TAETPRPEVS PLQGVSE |

SEQ ID NO: 128
BARDET-BIEDL SYNDROME 10 (BBS10)
AAH26355.2

| | |
|---|---|
| 1 | MLSSMAAAGS VKAALQVAEV LEAIVSCCVG PEGRQVLCTK PTGEVLLSRN GGRLLEALHL |
| 61 | EHPIARMIVD CVSSHLKKTG DGAKTFIIFL CHLLRGLHAI TDREKDPLMC ENIQTHGRHW |
| 121 | KNCSRWKFIS QALLTFQTQI LDGIMDQYLS RHFLSIFSSA KERTLCRSSL ELLLEAYFCG |
| 181 | RVGRNNHKFI SQLMCDYFFK CMTCKSGIGV FELVDDHFVE LNVGVTGLPV SDSRIIAGLV |
| 241 | LQKDFSVYRP ADGDMRMVIV TETIQPLFST SGSEFILNSE AQFQTSQFWI MEKTKAIMKH |
| 301 | LHSQNVKLLI SSVKQPDLVS YYAGVNGISV VECLSSEEVS LIRRIIGLSP FVPPQAFSQC |
| 361 | EIPNTALVKF CKPLILRSKR YVHLGLISTC AFIPHSIVLC GPVHGLIEQH EDALHGALKM |
| 421 | LRQLFKDLDL NYMTQTNDQN GTSSLFIYKN SGESYQAPDP GNGSIQRPYQ DTVAENKDAL |
| 481 | EKTQTYLKVH SNLVIPDVEL ETYIPYSTPT LTPTDTFQTV ETLTCLSLER NRLTDYYEPL |
| 541 | LKNNSTAYST RGNRIEISYE NLQVTNITRK GSMLPVSCKL PNMGTSQSYL SSSMPAGCVL |
| 601 | PVGGNFDILL HYYLLNYAKK CHQSEETMVS MIIANALLGI PKVLYKSKTG KYSFPHTYIR |
| 661 | AVHALQTNQP LVSSQTGLES VMGKYQLLTS VLQCLTKILT IDMVITVKRH PQKVHNQDSE |
| 721 | DEL |

SEQ ID NO: 129
TRIPARTITE MOTIF CONTAINING 32 (TRIM32)
AAH03154.1

| | |
|---|---|
| 1 | MAAAAASHLN LDALREVLEC PICMESFTEE QLRPKLLHCG HTICRQCLEK LLASSINGVR |
| 61 | CPFCSKITRI TSLTQLTDNL TVLKIIDTAG LSEAVGLLMC RSCGRRLPRQ FCRSCGLVLC |
| 121 | EPCREADHQP PGHCTLPVKE AAEERRRDFG EKLTRLRELM GELQRRKAAL EGVSKDLQAR |
| 181 | YKAVLQEYGH EERRVQDELA RSRKFFTGSL AEVEKSNSQV VEEQSYLLNI AEVQAVSRCD |
| 241 | YFLAKIKQAD VALLEETADE EEPELTASLP RELTLQDVEL LKVGHVGPLQ IGQAVKKPRT |
| 301 | VNVEDSWAME ATASAASTSV TFREMDMSPE EVVASPRASP AKQRGPEAAS NIQQCLFLKK |
| 361 | MGAKGSTPGM FNLPVSLYVT SQGEVLVADR GNYRIQVFTR KGFLKEIRRS PSGIDSFVLS |
| 421 | FLGADLPNLT PLSVAMNCQG LIGVTDSYDN SLKVYTLDGH CVACHRSQLS KPWGITALPS |
| 481 | GQFVVTDVEG GKLWCFTVDR GSGVVKYSCL CSAVRPKFVT CDAEGTVYFT QGLGLNLENR |
| 541 | QNEHHLEGGF SIGSVGPDGQ LGRQISHFFS ENEDFRCIAG MCVDARGDLI VADSSRKEIL |
| 601 | HFPKGGGYSV LIREGLTCPV GIALTPKGQL LVLDCWDHCI KIYSYHLRRY STP |

SEQ ID NO: 130
TRIPARTITE MOTIF CONTAINING 32 (TRIM32), ISOFORM CRA_A
EAW87447.1

| | |
|---|---|
| 1 | MAAAAASHLN LDALREVLEC PICMESFTEE QLRPKLLHCG HTICRQCLEK LLASSINGVR |
| 61 | CPFCSKITRI TSLTQLTDNL TVLKIIDTAG LSEAVGLLMC RSCGRRLPRQ FCRSCGLVLC |
| 121 | EPCREADHQP PGHCTLPVKE AAEERRRDFG EKLTRLRELM GELQRRKAAL EGVSKDLQAR |
| 181 | YKAVLQEYGH EERRVQDELA RSRKFFTGSL AEVEKSNSQV VEEQSYLLNI AEVQAVSRCD |
| 241 | YFLAKIKQAD VALLEETADE EEPELTASLP RELTLQDVEL LKVGHVGPLQ IGQAVKKPRT |
| 301 | VNVEDSWAME ATASAASTSV TFREMDMSPE EVVASPRASP AKQRGPEAAS NIQQCLFLKK |
| 361 | MGAKGSTPGM FNLPVSLYVT SQGEVLVADR GNYRIQVFTR KGFLKEIRRS PSGIDSFVLS |
| 421 | FLGADLPNLT PLSVAMNCQG LIGVTDSYDN SLKVYTLDGH CVACHRSQLS KPWGITALPS |
| 481 | GQFVVTDVEG GKLWCFTVDR GSGVVKYSCL CSAVRPKFVT CDAEGTVYFT QGLGLNLENR |
| 541 | QNEHHLEGGF SIGSVGPDGQ LGRQISHFFS ENEDFRCIAG MCVDARGDLI VADSSRKEIL |
| 601 | HFPKGGGYSV LIREGLTCPV GIALTPKGQL LVLDCWDHCI KIYSYHLRRY STP |

SEQ ID NO: 131
BARDET-BIEDL SYNDROME 12 (BBS12)
AAH55426.1

| | |
|---|---|
| 1 | MVMACRVVNK RRHMGLQQLS SFAETGRTFL GPLKSSKFII DEECHESVLI SSTVRLLESL |
| 61 | DLTSAVGQLL NEAVQAQNNT YRTGISTLLF LVGAWSSAVE ECLHLGVPIS IIVSVMSEGL |
| 121 | NFCSEEVVSL HVPVHNIFDC MDSTKTFSQL ETFSVSLCPF LQVPSDTDLI EELHGLKDVA |
| 181 | SQTLTISNLS GRPLRSYELF KPQTKVEADN NTSRTLKNSL LADTCCRQSI LIHSRHFNRT |
| 241 | DNTEGVSKPD GFQEHVTATH KTYRCNDLVE LAVGLSHGDH SSMKLVEEAV QLQYQNACVQ |
| 301 | QGNCTKPFMF DISRIFTCCL PGLPETSSCV CPGYITVVSV SNNPVIKELQ NQPVRIVLIE |
| 361 | GDLTENYRHL GFNKSANIKT VLDSMQLQED SSEELWANHV LQVLIQFKVN LVLVQGNVSE |
| 421 | RLIEKCINSK RLVIGSVNGS VMQAFAEAAG AVQVAYITQV NEDCVGNGVC VTFWRSSPLD |
| 481 | VVDRNNRIAI LLKTEGINLV TAVLTNPVTA QMQIKEDRFW TCAYRLYYAL KEEKVFLGGG |
| 541 | AVEFLCLSCL HILAEQSLKK ENHACSGWLH NTSSWLASSL AIYRPTVLKF LANGWQKYLS |
| 601 | TLLYNTANYS SEFEVSTYIQ HHLQNATDSG SPSSYILNEY SKLNSRIFNS DISNKLEQIP |
| 661 | RVYDVVTPKI EAWRRALDLV LLVLQTDSEI ITGHGHTQIN SQELTGFLFL |

SEQ ID NO: 132
MKS TRANSITION ZONE COMPLEX SUBUNIT 1 (MKS1)
NP_060247.2

| | |
|---|---|
| 1 | MAETVWSTDT GEAVYRSRDP VRNLRLRVHL QRITSSNFLH YQPAAELGKD LIDLATFRPQ |
| 61 | PTASGHRPEE DEEEEIVIGW QEKLFSQFEV DLYQNETACQ SPLDYQYRQE ILKLENSGGK |
| 121 | KNRRIFTYTD SDRYTNLEEH CQRMTTAASE VPSFLVERMA NVRRRRQDRR GMEGGILKSR |
| 181 | IVTWEPSEEF VRNNHVINTP LQTMHIMADL GPYKKLGYKK YEHVLCTLKV DSNGVITVKP |
| 241 | DFTGLKGPYR IETEGEKQEL WKYTIDNVSP HAQPEEEERE RRVFKDLYGR HKEYLSSLVG |
| 301 | TDFEMTVPGA LRLFVNGEVV SAQGYEYDNL YVHFFVELPT AHWSSPAFQQ LSGVTQTCTT |
| 361 | KSLAMDKVAH FSYPFTFEAF FLHEDESSDA LPEWPVLYCE VLSLDFWQRY RVEGYGAVVL |
| 421 | PATPGSHTLT VSTWRPVELG TVAELRRFFI GGSLELEDLS YVRIPGSFKG ERLSRFGLRT |
| 481 | ETTGTVTFRL HCLQQSRAFM ESSSLQKRMR SVLDRLEGFS QQSSIHNVLE AFRRARRRMQ |
| 541 | EARESLPQDL VSPSGTLVS |

SEQ ID NO: 133
WD REPEAT CONTAINING PLANAR CELL POLARITY EFFECTOR (WDPCP), HOMOLOG ISOFORM 1
NP_001036157.1

| | |
|---|---|
| 1 | MFSSLHSALL TDSFIILSFL AQNKLCFIQF TKKMESSDVN KRLEKLSALD YKIFYYEIPG |
| 61 | PINKTTERHL AINCVHDRVV CWWPLVNDDA WPWAPISSEK DRANLLLLGY AQGRLEVLSS |
| 121 | VRTEWDPLDV RFGTKQPYQV FTVEHSVSVD KEPMADSCIY ECIRNKIQCV SVTRIPLKSK |
| 181 | AISCCRNVTE DKLILGCEDS SLILYETHRR VTLLAQTELL PSLISCHPSG AILLVGSNQG |
| 241 | ELQIFDMALS PINIQLLAED RLPRETLQFS KLFDASSSLV QMQWIAPQVV SQKGEGSDIY |
| 301 | DLLFLRFERG PLGVLLFKLG VFTRGQLGLI DIIFQYIHCD EIYEAINILS SMNWDTLGHQ |
| 361 | CFISMSAIVN HLLRQKLTPE REAQLETSLG TFYAPTRPLL DSTILEYRDQ ISKYARRFFH |
| 421 | HLLRYQRFEK AFLLAVDVGA RDLFMDIHYL ALDKGELALA EVARKRASDI DAESITSGVE |
| 481 | LLGPLDRGDM LNEAFIGLSL APQGEDSFPD NLPPSCPTHR HILQQRILNG SSNRQIIDRR |
| 541 | NELEKDICSG FLMTNTCNAE DGELREDGRE QEIRDGGSLK MIHFGLV |

SEQ ID NO: 134
WD REPEAT CONTAINING PLANAR CELL POLARITY EFFECTOR (WDPCP), HOMOLOG ISOFORM 2
NP_056994.3

| | |
|---|---|
| 1 | MRREFCWDAY SKAAGSRASS PLPRQDRDSF CHQMSFCLTE LHLWSLKNTL HIADRDIGIY |
| 61 | QYYDKKDPPA TEHGNLEKKQ KLAESRDYPW TLKNRRPEKL RDSLKELEEL MQNSRCVLSK |
| 121 | WKNKYVCQLL FGSGVLVSLS LSGPQLEKVV IDRSLVGKLI SDTISDALLT DSFIILSFLA |
| 181 | QNKLCFIQFT KKMESSDVNK RLEKLSALDY KIFYYEIPGP INKTTERHLA INCVHDRVVC |
| 241 | WWPLVNDDAW PWAPISSEKD RANLLLLGYA QGRLEVLSSV RTEWDPLDVR FGTKQPYQVF |
| 301 | TVEHSVSVDK EPMADSCIYE CIRNKIQCVS VTRIPLKSKA ISCCRNVTED KLILGCEDSS |
| 361 | LILYETHRRV TLLAQTELLP SLISCHPSGA ILLVGSNQGE LQIFDMALSP INIQLLAEDR |
| 421 | LPRETLQFSK LFDASSSLVQ MQWIAPQVVS QKGEGSDIYD LLFLRFERGP LGVLLFKLGV |
| 481 | FTRGQLGLID IIFQYIHCDE IYEAINILSS MNWDTLGHQC FISMSAIVNH LLRQKLTPER |
| 541 | EAQLETSLGT FYAPTRPLLD STILEYRDQI SKYARRFFHH LLRYQRFEKA FLLAVDVGAR |
| 601 | DLFMDIHYLA LDKGELALAE VARKRASDID AESITSGVEL LGPLDRGDML NEAFIGLSLA |
| 661 | PQGEDSFPDN LPPSCPTHRH ILQQRILNGS SNRQIIDRRN ELEKDICSGF LMTNTCNAED |
| 721 | GELREDGREQ EIRDGGSLKM IHFGLV |

SEQ ID NO: 135
WD REPEAT CONTAINING PLANAR CELL POLARITY EFFECTOR (WDPCP), HOMOLOG ISOFORM 3
NP_001340973.1

| | |
|---|---|
| 1 | MDRDSFCHQM SFCLTELHLW SLKNTLHIAD RDIGIYQYYD KKDPPATEHG NLEKKQKLAE |
| 61 | SRDYPWTLKN RRPEKLRDSL KELEELMQNS RCVLSKWKNK YVCQLLFGSG VLVSLSLSGP |
| 121 | QLEKVVIDRS LVGKLISDTI SDALLTDSFI ILSFLAQNKL CFIQFTKKME SSDVNKRLEK |
| 181 | LSALDYKIFY YEIPGPINKT TERHLAINCV HDRVVCWWPL VNDDAWPWAP ISSEKDRANL |
| 241 | LLLGYAQGRL EVLSSVRTEW DPLDVRFGTK QPYQVFTVEH SVSVDKEPMA DSCIYECIRN |
| 301 | KIQCVSVTRI PLKSKAISCC RNVTEDKLIL GCEDSSLILY ETHRRVTLLA QTELLPSLIS |
| 361 | CHPSGAILLV GSNQGELQIF DMALSPINIQ LLAEDRLPRE TLQFSKLFDA SSSLVQMQWI |
| 421 | APQVVSQKGE GSDIYDLLFL RFERGPLGVL LFKLGVFTRG QLGLIDIIFQ YIHCDEIYEA |
| 481 | INILSSMNWD TLGHQCFISM SAIVNHLLRQ KLTPEREAQL ETSLGTFYAP TRPLLDSTIL |
| 541 | EYRDQISKYA RRFFHHLLRY QRFEKAFLLA VDVGARDLFM DIHYLALDKG ELALAEVARK |
| 601 | RASDIDAESI TSGVELLGPL DRGDMLNEAF IGLSLAPQGE DSFPDNLPPS CPTHRHILQQ |
| 661 | RILNGSSNRQ IIDRRNELEK DICSGFLMTN TCNAEDGELR EDGREQEIRD GGSLKMIHFG |
| 721 | LV |

SEQ ID NO: 136
WD REPEAT CONTAINING PLANAR CELL POLARITY EFFECTOR (WDPCP), HOMOLOG ISOFORM 4
NP_001340974.1

| | |
|---|---|
| 1 | MRREFCWDAY SKAAGSRASS PLPRQDRDSF CHQMSFCLTE LHLWSLKNTL HIADRDIGIY |
| 61 | QYYDKKDPPA TEHGNLEKKQ KLAESRDYPW TLKNRRPEKL RDSLKELEEL MQNSRCVLSK |
| 121 | WKNKYVCQLL FGSGVLVSLS LSGPQLEKVV IDRSLVGKLI SDTISDALLT DSFIILSFLA |
| 181 | QNKLCFIQFT KKMESSDVNK RLEKLSALDY KIFYYEIPGP INKTTERHLA INCVHDRVVC |
| 241 | WWPLVNDDAW PWAPISSEKD RANLLLLGYA QGRLEVLSSV RTEWDPLDVR FGTKQPYQVF |
| 301 | TVEHSVSVDK EPMADSCIYE CIRNKIQCVS VTRIPLKSKA ISCCRNVTED KLILGCEDSS |
| 361 | LILYETHRRV TLLAQTELLP SLISCHPSGA ILLVGSNQGE LQIFDMALSP INIQLLAEDR |
| 421 | LPRETLQFSK LFDASSSLVQ MQWIAPQVVS QKGEGSDIYD LLFLRFERGP LGVLLFKLGV |
| 481 | FTRGQLGLID IIFQYIHCDE IYEAINILSS MNWDTLGHQC FISMSAIVNH LLRQKLTPER |
| 541 | EAQLETSLGT FYAPTRPLLD STILEYRDQI SKYARRFFHH LLRWSLALSP RLECSDVIAV |
| 601 | HCHLHLLGSS DSSASASRVA GTTGMCHHTQ LIFVVFSRDG ISPCWPGWS |

SEQ ID NO: 137
SEROLOGICALLY DEFINED COLON CANCER ANTIGEN 8 (SDCCAG8)
Q86SQ7.1

| | |
|---|---|
| 1 | MAKSPENSTL EEILGQYQRS LREHASRSIH QLTCALKEGD VTIGEDAPNL SFSTSVGNED |
| 61 | ARTAWPELQQ SHAVNQLKDL LRQQADKESE VSPSRRRKMS PLRSLEHEET NMPTMHDLVH |
| 121 | TINDQSQYIH HLEAEVKFCK EELSGMKNKI QVVVLENEGL QQQLKSQRQE ETLREQTLLD |
| 181 | ASGNMHNSWI TTGEDSGVGE TSKRPFSHDN ADFGKAASAG EQLELEKLKL TYEEKCEIEE |
| 241 | SQLKFLRNDL AEYQRTCEDL KEQLKHKEFL LAANTCNRVG GLCLKCAQHE AVLSQTHTNV |
| 301 | HMQTIERLVK ERDDLMSALV SVRSSLADTQ QREASAYEQV KQVLQISEEA NFEKTKALIQ |
| 361 | CDQLRKELER QAERLEKELA SQQEKRAIEK DMMKKEITKE REYMGSKMLI LSQNIAQLEA |
| 421 | QVEKVTKEKI SAINQLEEIQ SQLASREMDV TKVCGEMRYQ LNKTNMEKDE AEKEHREFRA |
| 481 | KTNRDLEIKD QEIEKLRIEL DESKQHLEQE QQKAALAREE CLRLTELLGE SEHQLHLTRQ |
| 541 | EKDSIQQSFS KEAKAQALQA QQREQELTQK IQQMEAQHDK TENEQYLLLT SQNTFLTKLK |
| 601 | EECCTLAKKL EQISQKTRSE IAQLSQEKRY TYDKLGKLQR RNEELEEQCV QHGRVHETMK |
| 661 | QRLRQLDKHS QATAQQLVQL LSKQNQLLLE RQSLSEEVDR LRTQLPSMPQ SDC |

SEQ ID NO: 138
LEUCINE ZIPPER TRANSCRIPTION FACTOR LIKE 1 (LZTFL1)
CAB95836.1

| | |
|---|---|
| 1 | MAELGLNEHH QNEVINYMRF ARSKRGLRLK TVDSCFQDLK ESRLVEDTFT IDEVSEVLNG |
| 61 | LQAVVHSEVE SELINTAYTN VLLLRQLFAQ AEKWYLKLQT DISELENREL LEQVAEFEKA |
| 121 | EITSSNKKPI LDVTKPKLAP LNEGGTAELL NKEILRLQEE NEKLKSRLKT IEIQATNALD |
| 181 | EKSKLEKALQ DLQLDQGNQK DFIKAQDLSN LENTVAALKS EFQKTLNDKT ENQKSLEENL |
| 241 | ATAKHDLLRV QEQLHMAEKE LEKKFQQTAA YRNMKEILTK KNDQIKDLRK RLAQYEPED |

SEQ ID NO: 139
BBSOME INTERACTING PROTEIN 1 (BBIP1), ISOFORM 1
NP_001182233.1

| | |
|---|---|
| 1 | MLKAAAKRPE LSGLLKFNNY GILSESPLTS QRTTWLLYQS PSFIPGFAYP SRCLKTIGGV |
| 61 | YKQARKKHYI QQLRYGRSEV NVPGSSSKAR ATVCGRYNDN GAV |

SEQ ID NO: 140
BBSOME INTERACTING PROTEIN 1 (BBIP1), ISOFORM 2
NP_001182234.1

| | |
|---|---|
| 1 | MLKAAAKRPE LSGKNTISNN SDMAEVKSMF REVLPKQGPL FVEDIMTMVL CKPKLLPLKS |
| 61 | LTLEKLEKMH QAAQNTIRQQ EMAEKDQRQI TH |

SEQ ID NO: 141
INTRAFLAGELLAR TRANSPORT 27 (IFT27), HOMOLOG ISOFORM 1
NP_001349932.1

| | |
|---|---|
| 1 | MVKLAAKCIL AGDPAVGKTA LAQIFRSDGA HFQKSYTLTT GMDLVVKTVP VPDTGDSVEL |
| 61 | FIFDSAGKEL FSEMLDKLWE SPNVLCLVYD VTNEESFNNC SKWLEKARSQ APGISLPGVL |
| 121 | VGNKTDLAGR RAVDSAEARA WALGQGLECF ETSVKEMENF EAPFHCLAKQ FHQLYREKVE |
| 181 | VFRALA |

SEQ ID NO: 142
INTRAFLAGELLAR TRANSPORT 27 (IFT27), HOMOLOG ISOFORM 2
NP_006851.1

| | |
|---|---|
| 1 | MVKLAAKCIL ADPAVGKTAL AQIFRSDGAH FQKSYTLTTG MDLVVKTVPV PDTGDSVELF |
| 61 | IFDSAGKELF SEMLDKLWES PNVLCLVYDV TNEESFNNCS KWLEKARSQA PGISLPGVLV |
| 121 | GNKTDLAGRR AVDSAEARAW ALGQGLECFE TSVKEMENFE APFHCLAKQF HQLYREKVEV |
| 181 | FRALA |

SEQ ID NO: 143
GUANYLATE CYCLASE ACTIVATOR 1A (GUCA1A)
EAX04084.1

| | |
|---|---|
| 1 | MGNVMEGKSV EELSSTECHQ WYKKFMTECP SGQLTLYEFR QFFGLKNLSP SASQYVEQMF |
| 61 | ETFDFNKDGY IDFMEYVAAL SLVLKGKVEQ KLRWYFKLYD VDGNGCIDRD ELLTIIQAIR |
| 121 | AINPCSDTTM TAEEFTDTVF SKIDVNGDGE LSLEEFIEGV QKDQMLLDTL TRSLDLTRIV |
| 181 | RRLQNGEQDE EGADEAAEAA G |

SEQ ID NO: 144
OPA1 MITOCHONDRIAL DYNAMIN LIKE GTPASE (OPA1);
AAH58013.1

| | |
|---|---|
| 1 | MTEPKGKEHD DIFDKLKEAV KEESIKRHKW NDFAEDSLRV IQHNALEDRS ISDKQQWDAA |
| 61 | IYFMEEALQA RLKDTENAIE NMVGPDWKKR WLYWKNRTQE QCVHNETKNE LEKMLKCNEE |
| 121 | HPAYLASDEI TTVRKNLESR GVEVDPSLIK DTWHQVYRRH FLKTALNHCN LCRRGFYYYQ |
| 181 | RHFVDSELEC NDVVLFWRIQ RMLAITANTL RQQLTNTEVR RLEKNVKEVL EDFAEDGEKK |
| 241 | IKLLTGKRVQ LAEDLKKVRE IQEKLDAFIE ALHQEK |

SEQ ID NO: 145
RP1 AXONEMAL MICROTUBULE ASSOCIATED (RP1)
AAA20120.1

| | |
|---|---|
| 1 | MQKWFSAFDD AIIQRQWRAN PSRGGGGVSF TKEVDTNVAT GAPPRRQRVP GRACPWREPI |
| 61 | RGRRGARPGG GDAGGTPGET VRHCSAPEDP IFRFSSLHSY PFPGTIKSRD MSWKRHHLIP |
| 121 | ETFGVKRRRK RGPVESDPLR GEPGSARAAV SELMQLFPRG LFEDALPPIV LRSQVYSLVP |
| 181 | DRTVADRQLK ELQEQGEIRI VQLGFDLDAH GIIFTEDYRT RVLKACDGRP YAGAVQKFLA |
| 241 | SVLPACGDLS FQQDQMTQTF GFRDSEITHL VNAGVLTVRD AGSWWLAVPG AGRFIKYFVK |
| 301 | GRQAVLSMVR KAKYRELLLS ELLGRRAPVV VRLGLTYHVH DLIGAQLVDC ISTTSGTLLR |
| 361 | LPET |

SEQ ID NO: 146
RP2 ACTIVATOR OF ARL3 GTPASE (RP2)
ANZ79619.1

| | |
|---|---|
| 1 | MGCFFSKRRK ADKESRPENE EERPKQYSWD QREKVDPKDY MFSGLKDETV GRLPGTVAGQ |
| 61 | QFLIQDCENC NIYIFDHSAT VTIDDCTNCI IFLGPVKGSV FFRNCRDCKC TLACQQFRVR |
| 121 | DCRKLEVFLC CATQPIIESS SNIKFGCFQW YYPELAFQFK DAGLSIFNNT WSNIHDFTPV |
| 181 | SGELNWSLLP EDAVVQDYVP IPTTEELKAV RVSTEANRSI VPISRGQRQK SSDESCLVVL |
| 241 | FAGDYTIANA RKLIDEMVGK GFFLVQTKEV SMKAEDAQRV FREKAPDFLP LLNKGPVIAL |
| 301 | EFNGDGAVEV CQLIVNEIFN GTKMFVSESK ETASGDVDSF YNFADIQMGI |

SEQ ID NO: 147
PERIPHERIN 2 (PRPH2)
NP_000313.2

| | |
|---|---|
| 1 | MALLKVKFDQ KKRVKLAQGL WLMNWFSVLA GIIIFSLGLF LKIELRKRSD VMNNSESHFV |
| 61 | PNSLIGMGVL SCVFNSLAGK ICYDALDPAK YARWKPWLKP YLAICVLFNI ILFLVALCCF |
| 121 | LLRGSLENTL GQGLKNGMKY YRDTDTPGRC FMKKTIDMLQ IEFKCCGNNG FRDWFEIQWI |
| 181 | SNRYLDFSSK EVKDRIKSNV DGRYLVDGVP FSCCNPSSPR PCIQYQITNN SAHYSYDHQT |
| 241 | EELNLWVRGC RAALLSYYSS LMNSMGVVTL LIWLFEVTIT IGLRYLQTSL DGVSNPEESE |
| 301 | SESQGWLLER SVPETWKAFL ESVKKLGKGN QVEAEGADAG QAPEAG |

SEQ ID NO: 148
PRE-MRNA PROCESSING FACTOR 31 (PRPF31)
AAI17390.1

| | |
|---|---|
| 1 | MSLADELLAD LEEAAEEEEG GSYGEEEEEP AIEDVQEETQ LDLSGDSVKT IAKLWDSKMF |
| 61 | AEIMMKIEEY ISKQAKASEV MGPVEAAPEY RVIVDANNLT VEIENELNII HKFIRDKYSK |
| 121 | RFPELESLVP NALDYIRTVK ELGNSLDKCK NNENLQQILT NATIMVVSVT ASTTQGQQLS |
| 181 | EEELERLEEA CDMALELNAS KHRIYEYVES RMSFIAPNLS IIIGASTAAK IMGVAGGLTN |
| 241 | LSKMPACNIM LLGAQRKTLS GFSSTSVLPH TGYIYHSDIV QSLPPDLRRK AARLVAAKCT |
| 301 | LAARVDSFHE STEGKVGYEL KDEIERKFDK WQEPPPVKQV KPLPAPLDGQ RKKRGGRRYR |
| 361 | KMKERLGLTE IRKQANRMSF GEIEEDAYQE DLGFSLGHLG KSGSGRVRQT QVNEATKARI |
| 421 | SKTLQRTLQK QSVVYGGKST IRDRSSGTAS SVAFTPLQGL EIVNPQAAEK KVAEANQKYF |
| 481 | SSMAEFLKVK GEKSGLMST |

SEQ ID NO: 149
PRE-MRNA PROCESSING FACTOR 31 (PRPF31), ISOFORM CRA_A
EAW72190.1

| | |
|---|---|
| 1 | MSLADELLAD LEEAAEEEEG GSYGEEEEEP AIEDVQEETQ LDLSGDSVKT IAKLWDSKMF |
| 61 | AEIMMKIEEY ISKQAKASEV MGPVEAAPEY RVIVDANNLT VEIENELNII HKFIRDKYSK |
| 121 | RFPELESLVP NALDYIRTVK ELGNSLDKCK NNENLQQILT NATIMVVSVT ASTTQGQQLS |
| 181 | EEELERLEEA CDMALELNAS KHRIYEYVES RMSFIAPNLS IIIGASTAAK IMGVAGGLTN |
| 241 | LSKMPACNIM LLGAQRKTLS GFSSTSVLPH TGYIYHSDIV QSLPPDLRRK AARLVAAKCT |
| 301 | LAARVDSFHE STEGKVGYEL KDEIERKFDK WQEPPPVKQV KPLPAPLDGQ RKKRGGRRYR |
| 361 | KMKERLGLTE IRKQANRMSF GEIEEDAYQE DLGFSLGHLG KSGSGRVRQT QVNEATKARI |
| 421 | SKTLQRTLQK QSVVYGGKST IRDRSSGTAS SVAFTPLQGL EIVNPQAAEK KVAEANQKYF |
| 481 | SSMAEFLKVK GEKSGLMST |

SEQ ID NO: 150
PRE-MRNA PROCESSING FACTOR 31 (PRPF31), ISOFORM CRA_A
EAW72191.1

| | |
|---|---|
| 1 | MFAEIMMKIE EYISKQAKAS EVMGPVEAAP EYRVIVDANN LTVEIENELN IIHKFIRDKY |
| 61 | SKRFPELESL VPNALDYIRT VKELGNSLDK CKNNENLQQI LTNATIMVVS VTASTTQGQQ |
| 121 | LSEEELERLE EACDMALELN ASKHRIYEYV ESRMSFIAPN LSIIIGASTA AKIMGVAGGL |
| 181 | TNLSKMPACN IMLLGAQRKT LSGFSSTSVL PHTGYIYHSD IVQSLPPDLR RKAARLVAAK |
| 241 | CTLAARVDSF HESTEGKVGY ELKDEIERKF DKWQEPPPVK QVKPLPAPLD GQRKKRGGRR |

SEQ ID NO: 151
PRE-MRNA PROCESSING FACTOR 8 (PRPF8)
AAH64370.1

| | |
|---|---|
| 1 | MAGVFPYRGP GNPVPGPLAP LPDYMSEEKL QEKARKWQQL QAKRYAEKRK FGFVDAQKED |
| 61 | MPPEHVRKII RDHGDMTNRK FRHDKRVYLG ALKYMPHAVL KLLENMPMPW EQIRDVPVLY |
| 121 | HITGAISFVN EIPWVIEPVY ISQWGSMWIM MRREKRDRRH FKRMRFPPFD DEEPPLDYAD |
| 181 | NILDVEPLEA IQLELDPEED APVLDWFYDH QPLRDSRKYV NGSTYQHWQF TLPMMSTLYR |
| 241 | LANQLLTDLV DDNYFYLFDL KAFFTSKALN MAIPGGPKFE PLVRDINLQD EDWNEFNDIN |
| 301 | KIIIRQPIRT EYKIAFPYLY NNLPHHVHLT WYHTPNVVFI KTEDPDLPAF YFDPLINPIS |
| 361 | HRHSVKSQEP LPDDDEEFEL PEFVEPFLKD TPLYTDNTAN GIALLWAPRP FNLRSGRTRR |
| 421 | ALDIPLVKNW YREHCPAGQP VKVRVSYQKL LKYYVLNALK HRPPKAQKKR YLFRSFKATK |
| 481 | FFQSTKLDWV EVGLQVCRQG YNMLNLLIHR KNLNYLHLDY NFNLKPVKTL TTKERKKSRF |
| 541 | GNAFHLCREV LRLTKLVVDS HVQYRLGNVD AFQLADGLQY IFAHVGQLTG MYRYKYKLMR |
| 601 | QIRMCKDLKH LIYYRFNTGP VGKGPGCGFW AAGWRVWLFF MRGITPLLER WLGNLLARQF |
| 661 | EGRHSKGVAK TVTKQRVESH FDLELRAAVM HDILDMMPEG IKQNKARTIL QHLSEAWRCW |
| 721 | KANIPWKVPG LPTPIENMIL RYVKAKADWW TNTAHYNRER IRRGATVDKT VCKKNLGRLT |
| 781 | RLYLKAEQER QHNYLKDGPY ITAEEAVAVY TTTVHWLESR RFSPIPFPPL SYKHDTKLLI |
| 841 | LALERLKEAY SVKSRLNQSQ REELGLIEQA YDNPHEALSR IKRHLLTQRA FKEVGIEFMD |
| 901 | LYSHLVPVYD VEPLEKITDA YLDQYLWYEA DKRRLFPPWI KPADTEPPPL LVYKWCQGIN |
| 961 | NLQDVWETSE GECNVMLESR FEKMYEKIDL TLLNRLLRLI VDHNIADYMT AKNNVVINYK |
| 1021 | DMNHTNSYGI IRGLQFASFI VQYYGLVMDL LVLGLHRASE MAGPPQMPND FLSFQDIATE |
| 1081 | AAHPIRLFCR YIDRIHIFFR FTADEARDLI QRYLTEHPDP NNENIVGYNN KKCWPRDARM |
| 1141 | RLMKHDVNLG RAVFWDIKNR LPRSVTTVQW ENSFVSVYSK DNPNLLFNMC GFECRILPKC |
| 1201 | RTSYEEFTHK DGVWNLQNEV TKERTAQCFL RVDDESMQRF HNRVRQILMA SGSTIFTKIV |
| 1261 | NKWNTALIGL MTYFREAVVN TQELLDLLVK CENKIQTRIK IGLNSKMPSR FPPVVFYTPK |
| 1321 | ELGGLGMLSM GHVLIPQSDL RWSKQTDVGI THFRSGMSHE EDQLIPNLYR YIQPWESEFI |
| 1381 | DSQRVWAEYA LKRQEAIAQN RRLTLEDLED SWDRGIPRIN TLFQKDRHTL AYDKGWRVRT |
| 1441 | DFKQYQVLKQ NPFWWTHQRH DGKLWNLNNY RTDMIQALGG VEGILEHTLF KGTYFPTWEG |
| 1501 | LFWEKASGFE ESMKWKKLTN AQRSGLNQIP NRRFTLWWSP TINRANVYVG FQVQLDLTGI |
| 1561 | FMHGKIPTLK ISLIQIFRAH LWQKIHESIV MDLCQVFDQE LDALEIETVQ KETIHPRKSY |
| 1621 | KMNSSCADIL LFASYKWNVS RPSLLADSKD VMDSTTTQKY WIDIQLRWGD YDSHDIERYA |
| 1681 | RAKFLDYTTD NMSIYPSPTG VLIAIDLAYN LHSAYGNWFP GSKPLIQQAM AKIMKANPAL |
| 1741 | YVLRERIRKG LQLYSSEPTE PYLSSQNYGE LFSNQIIWFV DDINVYRVII HKTFEGNLTT |
| 1801 | KPINGAIFIF NPRTGQLFLK IIHTSVWAGQ KRLGQLAKWK TAEEVAALIR SLPVEEQPKQ |
| 1861 | IIVTRKGMLD PLEVHLLDFP NIVIKGSELQ LPFQACLKVE KFGDLILKAT EPQMVLFNLY |
| 1921 | DDWLKTISSY TAFSRLILIL RALHVNNDRA KVILKPDKTT ITEPHHIWPT LTDEEWIKVE |
| 1981 | VQLKDLILAD YGKKNNVNVA SLTQSEIRDI ILGMEISAPS QQRQQIAEIE KQTKEQSQLT |
| 2041 | ATQTRTVNKH GDEIITSTTS NYETQTFSSK TEWRVRAISA ANLHLRTNHI YVSSDDIKET |
| 2101 | GYTYILPKNV LKKFICISDL RAQIAGYLYG VSPPDNPQVK EIRCIVMVPQ WGTHQTVHLP |
| 2161 | GQLPQHEYLK EMEPLGWIHT QPNESPQLSP QDVTTHAKIM ADNPSWDGEK TIIITCSFTP |
| 2221 | GSCTLTAYKL TPSGYEWGRQ NTDKGNNPKG YLPSHYERVQ MLLSDRFLGF FMVPAQSSWN |
| 2281 | YNFMGVRHDP NMKYELQLAN PKEFYHEVHR PSHFLNFALL QEGEVYSADR EDLYA |

SEQ ID NO: 152
PRE-MRNA PROCESSING FACTOR 8 (PRPF8), ISOFORM CRA_A
EAW90588.1

| | |
|---|---|
| 1 | MAGVFPYRGP GNPVPGPLAP LPDYMSEEKL QEKARKWQQL QAKRYAEKRK FGFVDAQKED |
| 61 | MPPEHVRKII RDHGDMTNRK FRHDKRVYLG ALKYMPHAVL KLLENMPMPW EQIRDVPVLY |
| 121 | HITGAISFVN EIPWVIEPVY ISQWGSMWIM MRREKRDRRH FKRMRFPPFD DEEPPLDYAD |
| 181 | NILDVEPLEA IQLELDPEED APVLDWFYDH QPLRDSRKYV NGSTYQRWQF TLPMMSTLYR |
| 241 | LANQLLTDLV DDNYFYLFDL KAFFTSKALN MAIPGGPKFE PLVRDINLQD EDWNEFNDIN |
| 301 | KIIIRQPIRT EYKIAFPYLY NNLPHHVHLT WYHTPNVVFI KTEDPDLPAF YFDPLINPIS |
| 361 | HRHSVKSQEP LPDDDEEFEL PEFVEPFLKD TPLYTDNTAN GIALLWAPRP FNLRSGRTRR |
| 421 | ALDIPLVKNW YREHCPAGQP VKVRVSYQKL LKYYVLNALK HRPPKAQKKR YLFRSFKATK |
| 481 | FFQSTKLDWV EVGLQVCRQG YNMLNLLIHR KNLNYLHLDY NFNLKPVKTL TTKERKKSRF |
| 541 | GNAFHLCREV LRLTKLVVDS HVQYRLGNVD AFQLADGLQY IFAHVGQLTG MYRYKYKLMR |
| 601 | QIRMCKDLKH LIYYRFNTGP VGKGPGCGFW AAGWRVWLFF MRGITPLLER WLGNLLARQF |
| 661 | EGRHSKGVAK TVTKQRVESH FDLELRAAVM HDILDMMPEG IKQNKARTIL QHLSEAWRCW |
| 721 | KANIPWKVPG LPTPIENMIL RYVKAKADWW TNTAHYNRER IRRGATVDKT VCKKNLGRLT |
| 781 | RLYLKAEQER QHNYLKDGPY ITAEEAVAVY TTTVHWLESR RFSPIPFPPL SYKHDTKLLI |
| 841 | LALERLKEAY SVKSRLNQSQ REELGLIEQA YDNPHEALSR IKRHLLTQRA FKEVGIEFMD |
| 901 | LYSHLVPVYD VEPLEKITDA YLDQYLWYEA DKRRLFPPWI KPADTEPPPL LVYKWCQGIN |
| 961 | NLQDVWETSE GECNVMLESR FEKMYEKIDL TLLNRLLRLI VDHNIADYMT AKNNVVINYK |
| 1021 | DMNHTNSYGI IRGLQFASFI VQYYGLVMDL LVLGLHRASE MAGPPQMPND FLSFQDIATE |
| 1081 | AAHPIRLFCR YIDRIHIFFR FTADEARDLI QRYLTEHPDP NNENIVGYNN KKCWPRDARM |
| 1141 | RLMKHDVNLG RAVFWDIKNR LPRSVTTVQW ENSFVSVYSK DNPNLLFNMC GFECRILPKC |
| 1201 | RTSYEEFTHK DGVWNLQNEV TKERTAQCFL RVDDESMQRF HNRVRQILMA SGSTIFTKIV |
| 1261 | NKWNTALIGL MTYFREAVVN TQELLDLLVK CENKIQTRIK IGLNSKMPSR FPPVVFYTPK |
| 1321 | ELGGLGMLSM GHVLIPQSDL RWSKQTDVGI THFRSGMSHE EDQLIPNLYR YIQPWESEFI |
| 1381 | DSQRVWAEYA LKRQEAIAQN RRLTLEDLED SWDRGIPRIN TLFQKDRHTL AYDKGWRVRT |
| 1441 | DFKQYQVLKQ NPFWWTHQRH DGKLWNLNNY RTDMIQALGG VEGILEHTLF KGTYFPTWEG |
| 1501 | LFWEKASGFE ESMKWKKLTN AQRSGLNQIP NRRFTLWWSP TINRANVYVG FQVQLDLTGI |
| 1561 | FMHGKIPTLK ISLIQIFRAH LWQKIHESIV MDLCQVFDQE LDALEIETVQ KETIHPRKSY |
| 1621 | KMNSSCADIL LFASYKWNVS RPSLLADSKD VMDSTTTQKY WIDIQLRWGD YDSHDIERYA |
| 1681 | RAKFLDYTTD NMSIYPSPTG VLIAIDLAYN LHSAYGNWFP GSKPLIQQAM AKIMKANPAL |
| 1741 | YVLRERIRKG LQLYSSEPTE PYLSSQNYGE LFSNQIIWFV DDINVYRVII HKTFEGNLTT |
| 1801 | KPINGAIFIF NPRTGQLFLK IIHTSVWAGQ KRLGQLAKWK TAEEVAALIR SLPVEEQPKQ |
| 1861 | IIVTRKGMLD PLEVHLLDFP NIVIKGSELQ LPFQACLKVE KFGDLILKAT EPQMVLFNLY |
| 1921 | DDWLKTISSY TAFSRLILIL RALHVNNDRA KVILKPDKTT ITEPHHIWPT LTDEEWIKVE |
| 1981 | VQLKDLILAD YGKKNNVNVA SLTQSEIRDI ILGMEISAPS QQRQQIAEIE KQTKEQSQLT |
| 2041 | ATQTRTVNKH GDEIITSTTS NYETQTFSSK TEWRVRAISA ANLHLRTNHI YVSSDDIKET |
| 2101 | GYTYILPKNV LKKFICISDL RAQVSKWTQL GHSVCPTHFV PKTQT |

SEQ ID NO: 153
PRE-MRNA PROCESSING FACTOR 8 (PRPF8), ISOFORM CRA_B
EAW90589.1

| | |
|---|---|
| 1 | MAGVFPYRGP GNPVPGPLAP LPDYMSEEKL QEKARKWQQL QAKRYAEKRK FGFVDAQKED |
| 61 | MPPEHVRKII RDHGDMTNRK FRHDKRVYLG ALKYMPHAVL KLLENMPMPW EQIRDVPVLY |
| 121 | HITGAISFVN EIPWVIEPVY ISQWGSMWIM MRREKRDRRH FKRMRFPPFD DEEPPLDYAD |
| 181 | NILDVEPLEA IQLELDPEED APVLDWFYDH QPLRDSRKYV NGSTYQRWQF TLPMMSTLYR |
| 241 | LANQLLTDLV DDNYFYLFDL KAFFTSKALN MAIPGGPKFE PLVRDINLQD EDWNEFNDIN |
| 301 | KIIIRQPIRT EYKIAFPYLY NNLPHHVHLT WYHTPNVVFI KTEDPDLPAF YFDPLINPIS |
| 361 | HRHSVKSQEP LPDDDEEFEL PEFVEPFLKD TPLYTDNTAN GIALLWAPRP FNLRSGRTRR |
| 421 | ALDIPLVKNW YREHCPAGQP VKVRVSYQKL LKYYVLNALK HRPPKAQKKR YLFRSFKATK |
| 481 | FFQSTKLDWV EVGLQVCRQG YNMLNLLIHR KNLNYLHLDY NFNLKPVKTL TTKERKKSRF |
| 541 | GNAFHLCREV LRLTKLVVDS HVQYRLGNVD AFQLADGLQY IFAHVGQLTG MYRYKYKLMR |
| 601 | QIRMCKDLKH LIYYRFNTGP VGKGPGCGFW AAGWRVWLFF MRGITPLLER WLGNLLARQF |
| 661 | EGRHSKGVAK TVTKQRVESH FDLELRAAVM HDILDMMPEG IKQNKARTIL QHLSEAWRCW |
| 721 | KANIPWKVPG LPTPIENMIL RYVKAKADWW TNTAHYNRER IRRGATVDKT VCKKNLGRLT |
| 781 | RLYLKAEQER QHNYLKDGPY ITAEEAVAVY TTTVHWLESR RFSPIPFPPL SYKHDTKLLI |
| 841 | LALERLKEAY SVKSRLNQSQ REELGLIEQA YDNPHEALSR IKRHLLTQRA FKEVGIEFMD |
| 901 | LYSHLVPVYD VEPLEKITDA YLDQYLWYEA DKRRLFPPWI KPADTEPPPL LVYKWCQGIN |
| 961 | NLQDVWETSE GECNVMLESR FEKMYEKIDL TLLNRLLRLI VDHNIADYMT AKNNVVINYK |
| 1021 | DMNHTNSYGI IRGLQFASFI VQYYGLVMDL LVLGLHRASE MAGPPQMPND FLSFQDIATE |
| 1081 | AAHPIRLFCR YIDRIHIFCR FTADEARDLI QRYLTEHPDP NNENIVGYNN KKCWPRDARM |
| 1141 | RLMKHDVNLG RAVFWDIKNR LPRSVTTVQW ENSFVSVYSK DNPNLLFNMC GFECRILPKC |
| 1201 | RTSYEEFTHK DGVWNLQNEV TKERTAQCFL RVDDESMQRF HNRVRQILMA SGSTIFTKIV |
| 1261 | NKWNTALIGL MTYFREAVVN TQELLDLLVK CENKIQTRIK IGLNSKMPSR FPPVVFYTPK |
| 1321 | ELGGLGMLSM GHVLIPQSDL RWSKQTDVGI THFRSGMSHE EDQLIPNLYR YIQPWESEFI |
| 1381 | DSQRVWAEYA LKRQEAIAQN RRLTLEDLED SWDRGIPRIN TLFQKDRHTL AYDKGWRVRT |
| 1441 | DFKQYQVLKQ NPFWWTHQRH DGKLWNLNNY RTDMIQALGG VEGILEHTLF KGTYFPTWEG |
| 1501 | LFWEKASGFE ESMKWKKLTN AQRSGLNQIP NRRFTLWWSP TINRANVYVG FQVQLDLTGI |
| 1561 | FMHGKIPTLK ISLIQIFRAH LWQKIHESIV MDLCQVFDQE LDALEIETVQ KETIHPRKSY |
| 1621 | KMNSSCADIL LFASYKWNVS RPSLLADSKD VMDSTTTQKY WIDIQLRWGD YDSHDIERYA |
| 1681 | RAKFLDYTTD NMSIYPSPTG VLIAIDLAYN LHSAYGNWFP GSKPLIQQAM AKIMKANPAL |
| 1741 | YVLRERIRKG LQLYSSEPTE PYLSSQNYGE LFSNQIIWFV DDINVYRVII HKTFEGNLTT |
| 1801 | KPINGAIFIF NPRTGQLFLK IIHTSVWAGQ KRLGQLAKWK TAEEVAALIR SLPVEEQPKQ |
| 1861 | IIVTRKGMLD PLEVHLLDFP NIVIKGSELQ LPFQACLKVE KFGDLILKAT EPQMVLFNLY |
| 1921 | DDWLKTISSY TAFSRLILIL RALHVNNDRA KVILKPDKTT ITEPHHIWPT LTDEEWIKVE |
| 1981 | VQLKDLILAD YGKKNNVNVA SLTQSEIRDI ILGMEISAPS QQRQQIAEIE KQTKEQSQLT |
| 2041 | ATQTRTVNKH GDEIITSTTS NYETQTFSSK TEWRVRAISA ANLHLRTNHI YVSSDDIKET |
| 2101 | GYTYILPKNV LKKFICISDL RAQIAGYLYG VSPPDNPQVK EIRCIVMVPQ WGTHQTVHLP |
| 2161 | GQLPQHEYLK EMEPLGWIHT QPNESPQLSP QDVTTHAKIM ADNPSWDGEK TIIITCSFTP |
| 2221 | GSCTLTAYKL TPSGYEWGRQ NTDKGNNPKG YLPSHYERVQ MLLSDRFLGF FMVPAQSSWN |
| 2281 | YNFMGVRHDP NMKYELQLAN PKEFYHEVHR PSHFLNFALL QEGEVYSADR EDLYA |

SEQ ID NO: 154
PRE-MRNA PROCESSING FACTOR 8 (PRPF8), ISOFORM CRA_C
EAW90590.1

| | |
|---|---|
| 1 | MMSTLYRQNT DKGNNPKGYL PSHYERVQML LSDRFLGFFM VPAQSSWNYN FMGVRHDPNM |
| 61 | KYELQLANPK EFYHEVHRPS HFLNFALLQE GEVYSADRED LYA |

SEQ ID NO: 155
PRE-MRNA PROCESSING FACTOR 8 (PRPF8), ISOFORM CRA_D
EAW90591.1

| | |
|---|---|
| 1 | MAGVFPYRGP GNPVPGPLAP LPDYMSEEKL QEKARKWQQL QAKRYAEKRK FGFVDAQKED |
| 61 | MPPEHVRKII RDHGDMTNRK FRHDKRVYLG ALKYMPHAVL KLLENMPMPW EQIRDVPVLY |
| 121 | HITGAISFVN EIPWVIEPVY ISQWGSMWIM MRREKRDRRH FKRMRFPPFD DEEPPLDYAD |
| 181 | NILDVEPLEA IQLELDPEED APVLDWFYDH QPLRDSRKYV NGSTYQRWQF TLPMMSTLYR |
| 241 | LANQLLTDLV DDNYFYLFDL KAFFTSKALN MAIPGGPKFE PLVRDINLQD EDWNEFNDIN |
| 301 | KIIIRQPIRT EYKIAFPYLY NNLPHHVHLT WYHTPNVVFI KTEDPDLPAF YFDPLINPIS |
| 361 | HRHSVKSQEP LPDDDEEFEL PEFVEPFLKD TPLYTDNTAN GIALLWAPRP FNLRSGRTRR |
| 421 | ALDIPLVKNW YREHCPAGQP VKVRVSYQKL LKYYVLNALK HRPPKAQKKR YLFRSFKATK |
| 481 | FFQSTKLDWV EVGLQVCRQG YNMLNLLIHR KNLNYLHLDY NFNLKPVKTL TTKERKKSRF |
| 541 | GNAFHLCREV LRLTKLVVDS HVQYRLGNVD AFQLADGLQY IFAHVGQLTG MYRYKYKLMR |
| 601 | QIRMCKDLKH LIYYRFNTGP VGKGPGCGFW AAGWRVWLFF MRGITPLLER WLGNLLARQF |
| 661 | EGRHSKGVAK TVTKQRVESH FDLELRAAVM HDILDMMPEG IKQNKARTIL QHLSEAWRCW |
| 721 | KANIPWKVPG LPTPIENMIL RYVKAKADWW TNTAHYNRER IRRGATVDKT VCKKNLGRLT |
| 781 | RLYLKAEQER QHNYLKDGPY ITAEEAVAVY TTTVHWLESR RFSPIPFPPL SYKHDTKLLI |
| 841 | LALERLKEAY SVKSRLNQSQ REELGLIEQA YDNPHEALSR IKRHLLTQRA FKEVGIEFMD |
| 901 | LYSHLVPVYD VEPLEKITDA YLDQYLWYEA DKRRLFPPWI KPADTEPPPL LVYKWCQGIN |
| 961 | NLQDVWETSE GECNVMLESR FEKMYEKIDL TLLNRLLRLI VDHNIADYMT AKNNVVINYK |
| 1021 | DMNHTNSYGI IRGLQFASFI VQYYGLVMDL LVLGLHRASE MAGPPQMPND FLSFQDIATE |
| 1081 | AAHPIRLFCR YIDRIHIFFR FTADEARDLI QRYLTEHPDP NNENIVGYNN KKCWPRDARM |
| 1141 | RLMKHDVNLG RAVFWDIKNR LPRSVTTVQW ENSFVSVYSK DNPNLLFNMC GFECRILPKC |
| 1201 | RTSYEEFTHK DGVWNLQNEV TKERTAQCFL RVDDESMQRF HNRVRQILMA SGSTIFTKIV |
| 1261 | NKWNTALIGL MTYFREAVVN TQELLDLLVK CENKIQTRIK IGLNSKMPSR FPPVVFYTPK |
| 1321 | ELGGLGMLSM GHVLIPQSDL RWSKQTDVGI THFRSGMSHE EDQLIPNLYR YIQPWESEFI |
| 1381 | DSQRVWAEYA LKRQEAIAQN RRLTLEDLED SWDRGIPRIN TLFQKDRHTL AYDKGWRVRT |
| 1441 | DFKQYQVLKQ NPFWWTHQRH DGKLWNLNNY RTDMIQALGG VEGILEHTLF KGTYFPTCEQ |
| 1501 | RSGKSDPEAR QDYYYRTTPH LAHSD |

SEQ ID NO: 156
PRE-MRNA PROCESSING FACTOR 8 (PRPF8), ISOFORM CRA_E
EAW90592.1

| | |
|---|---|
| 1 | MEISAPSQQR QQIAEIEKQT KEQSQLTATQ TRTVNKHGDE IITSTISNYE TQTFSSKTEW |
| 61 | RVRAISAANL HLRTNHIYVS SDDIKETGYT YILPKNVLKK FICISDLRAQ VSKWTQLGHS |
| 121 | VCPTHFVPKT QT |

SEQ ID NO: 157
PRE-MRNA PROCESSING FACTOR 8 (PRPF8), ISOFORM CRA_F
EAW90593.1

| | |
|---|---|
| 1 | MAGVFPYRGP GNPVPGPLAP LPDYMSEEKL QEKARKWQQL QAKRYAEKRK FGFVDAQKED |
| 61 | MPPEHVRKII RDHGDMTNRK FRHDKRVYLG ALKYMPHAVL KLLENMPMPW EQIRDVPVLY |
| 121 | HITGAISFVN EIPWVIEPVY ISQWGSMWIM MRREKRDRRH FKRMRFPPFD DEEPPLDYAD |
| 181 | NILDVEPLEA IQLELDPEED APVLDWFYDH QPLRDSRKYV NGSTYQRWQF TLPMMSTLYR |
| 241 | LANQLLTDLV DDNYFYLFDL KAFFTSKALN MAIPGGPKFE PLVRDINLQD EDWNEFNDIN |
| 301 | KIIIRQPIRT EYKIAFPYLY NNLPHHVHLT WYHTPNVVFI KTEDPDLPAF YFDPLINPIS |
| 361 | HRHSVKSQEP LPDDDEEFEL PEFVEPFLKD TPLYTDNTAN GIALLWAPRP FNLRSGRTRR |
| 421 | ALDIPLVKNW YREHCPAGQP VKVRVSYQKL LKYYVLNALK HRPPKAQKKR YLFRSFKATK |
| 481 | FFQSTKLDWV EVGLQVCRQG YNMLNLLIHR KNLNYLHLDY NFNLKPVKTL TTKERKKSRF |
| 541 | GNAFHLCREV LRLTKLVVDS HVQYRLGNVD AFQLADGLQY IFAHVGQLTG MYRYKYKLMR |
| 601 | QIRMCKDLKH LIYYRFNTGP VGKGPGCGFW AAGWRVWLFF MRGITPLLER WLGNLLARQF |
| 661 | EGRHSKGVAK TVTKQRVESH FDLELRAAVM HDILDMMPEG IKQNKARTIL QHLSEAWRCW |
| 721 | KANIPWKVPG LPTPIENMIL RYVKAKADWW TNTAHYNRER IRRGATVDKT VCKKNLGRLT |
| 781 | RLYLKAEQER QHNYLKDGPY ITAEEAVAVY TTTVHWLESR RFSPIPFPPL SYKHDTKLLI |
| 841 | LALERLKEAY SVKSRLNQSQ REELGLIEQA YDNPHEALSR IKRHLLTQRA FKEVGIEFMD |
| 901 | LYSHLVPVYD VEPLEKITDA YLDQYLWYEA DKRRLFPPWI KPADTEPPPL LVYKWCQGIN |
| 961 | NLQDVWETSE GECNVMLESR FEKMYEKIDL TLLNRLLRLI VDHNIADYMT AKNNVVINYK |
| 1021 | DMNHTNSYGI IRGLQFASFI VQYYGLVMDL LVLGLHRASE MAGPPQMPND FLSFQDIATE |
| 1081 | AAHPIRLFCR YIDRIHIFFR FTADEARDLI QRYLTEHPDP NNENIVGYNN KKCWPRDARM |
| 1141 | RLMKHDVNLG RAVFWDIKNR LPRSVTTVQW ENSFVSVYSK DNPNLLFNMC GFECRILPKC |
| 1201 | RTSYEEFTHK DGVWNLQNEV TKERTAQCFL RVDDESMQRF HNRVRQILMA SGSTIFTKIV |
| 1261 | NKWNTALIGL MTYFREAVVN TQELLDLLVK CENKIQTRIK IGLNSKMPSR FPPVVFYTPK |
| 1321 | ELGGLGMLSM GHVLIPQSDL RWSKQTDVGI THFRSGMSHE EDQLIPNLYR YIQPWESEFI |
| 1381 | DSQRVWAEYA LKRQEAIAQN RRLTLEDLED SWDRGIPRIN TLFQKDRHTL AYDKGWRVRT |
| 1441 | DFKQYQVLKQ NPFWWTHQRH DGKLWNLNNY RTDMIQALGG VEGILEHTLF KGTYFPTWEG |
| 1501 | LFWEKASGFE ESMKWKKLTN AQRSGLNQIP NRRFTLWWSP TINRANVYVG FQVQLDLTGI |
| 1561 | FMHGKIPTLK ISLIQIFRAH LWQKIHESIV MDLCQVFDQE LDALEIETVQ KETIHPRKSY |
| 1621 | KMNSSCADIL LFASYKWNVS RPSLLADSKD VMDSTTTQKY WIDIQLRWGD YDSHDIERYA |
| 1681 | RAKFLDYTTD NMSIYPSPTG VLIAIDLAYN LHSAYGNWFP GSKPLIQQAM AKIMKANPAL |
| 1741 | YVLRERIRKG LQLYSSEPTE PYLSSQNYGE LFSNQIIWFV DDINVYRVII HKTFEGNLTT |
| 1801 | KPINGAIFIF NPRTGQLFLK IIHTSVWAGQ KRLGQLAKWK TAEEVAALIR SLPVEEQPKQ |
| 1861 | IIVTRKGMLD PLEVHLLDFP NIVIKGSELQ LPFQACLKVE KFGDLILKAT EPQMVLFNLY |
| 1921 | DDWLKTISSY TAFSRLILIL RALHVNNDRA KVILKPDKTT ITEPHHIWPT LTDEEWIKVE |
| 1981 | VQLKDLILAD YGKKNNVNVA SLTQSEIRDI ILGMEISAPS QQRQQIAEIE KQTKEQSQLT |
| 2041 | ATQTRTVNKH GDEIITSTTS NYETQTFSSK TEWRVRAISA ANLHLRTNHI YVSSDDIKET |
| 2101 | GYTYILPKNV LKKFICISDL RAQIAGYLYG VSPPDNPQVK EIRCIVMVPQ WGTHQTVHLP |
| 2161 | GQLPQHEYLK EMEPLGWIHT QPNESPQLSP QDVTTHAKIM ADNPSWDGEK TIIITCSFTP |
| 2221 | GSCTLTAYKL TPSGYEWGRQ NTDKGNNPKG YLPSHYERVQ MLLSDRFLGF FMVPAQSSWN |
| 2281 | YNFMGVRHDP NMKYELQLAN PKEFYHEVHR PSHFLNFALL QEGEVYSADR EDLYA |

SEQ ID NO: 158
PRE-MRNA PROCESSING FACTOR 8 (PRPF8), ISOFORM CRA_G
EAW90594.1

| | |
|---|---|
| 1 | MAGVFPYRGP GNPVPGPLAP LPDYMSEEKL QEKARKWQQL QAKRYAEKRK FGFVDAQKED |
| 61 | MPPEHVRKII RDHGDMTNRK FRHDKRVYLG ALKYMPHAVL KLLENMPMPW EQIRDVPVLY |
| 121 | HITGAISFVN EIPWVIEPVY ISQWGSMWIM MRREKRDRRH FKRMRFPPFD DEEPPLDYAD |
| 181 | NILDVEPLEA IQLELDPEED APVLDWFYDH QPLRDSRKYV NGSTYQRWQF TLPMMMSPPM |
| 241 | PRSWLTTHLG MARRPLSSHA ASRQAPVH |

SEQ ID NO: 159
EYES SHUT HOMOLOG (EYS)
CAR64275.1

| | |
|---|---|
| 1 | MTDKSIVILS LMVFHSSFIN GKTCRRQLVE EWHPQPSSYV VNWILTENIC LDFYRDCWFL |
| 61 | GVNTKIDTSG NQAVPQICPL QIQLGDILVI SSEPSLQFPE INLMNVSETS FVGCVQNTTT |
| 121 | EDQLLFGCRL KGMHTVNSKW LSVGTHYFIT VMASGPSPCP LGLRLNVTVK QQFCQESLSS |
| 181 | EFCSGHGKCL SEAWSKTYSC HCQPPFSGKY CQELDACSFK PCKNNGSCIN KRENWDEQAY |
| 241 | ECVCHPPFTG KNCSEIIGQC QPHVCFHGNC SNITSNSFIC ECDEQFSGPF CEVSAKPCVS |
| 301 | LLFWKRGICP NSSSAYTYEC PKGSSSQNGE TDVSEFSLVP CQNGTDCIKI SNDVMCICSP |
| 361 | IFTDLLCKSI QTSCESFPLR NNATCKKCEK DYPCSCISGF TEKNCEKAID HCKLLSINCL |
| 421 | NEEWCFNIIG RFKYVCIPGC TKNPCWFLKN VYLIHQHLCY CGVTFHGICQ DKGPAQFEYV |
| 481 | WQLGFAGSEG EKCQGVIDAY FFLAANCTED ATYVNDPEDN NSSCWFPHEG TKEICANGCS |
| 541 | CLSEEDSQEY RYLCFLRWAG NMYLENTTDD QENECQHEAV CKDEINRPRC SCSLSYIGRL |
| 601 | CVVNVDYCLG NHSISVHGLC LALSHNCNCS GLQRYERNIC EIDTEDCKSA SRKNGTTSTH |
| 661 | LRGYFFRKCV PGFKGTQCEI DIDECASHPC KNGATCIDQP GNYFCQCVPP FKVVDGFSCL |
| 721 | CNPGYVGIRC EQDIDDCILN ACEHNSTCKD LHLSYQCVCL SDWEGNFCEQ ESNECKMNPC |
| 781 | KNNSTCTDLY KSYRCECTSG WTGQNCSEEI NECDSDPCMN GGLCHESTIP GQFVCLCPPL |
| 841 | YTGQFCHQRY NLCDLLHNPC RNNSTCLALV DANQHCICRE EFEGKNCEID VKDCLFLSCQ |
| 901 | DYGDCEDMVN NFRCICRPGF SGSLCEIEIN ECSSEPCKNN GTCVDLTNRF FCNCEPEYHG |
| 961 | PFCELDVNKC KISPCLDEEN CVYRTDGYNC LCAPGYTGIN CEINLDECLS EPCLHDGVCI |
| 1021 | DGINHYTCDC KSGFFGTHCE TNANDCLSNP CLHGRYTELI NEYPCSCDAD GTSTQCKIKI |
| 1081 | NDCTSIPCMN EGFCQKSAHG FICICPRGYT GAYCEKSIDN CAEPELNSVI CLNGGICVDG |
| 1141 | PGHTFDCRCL PGFSGQFCEI NINECSSSPC LHGADCEDHI NGHVCKCQPG WSGHHCENEL |
| 1201 | ECIPNSCVHE LCMENEPGST CLCTPGFMTC SIGLLCGDEI RRITCLTPIF QRTDPISTQT |
| 1261 | YTIPPSETLV SSFPSIKATR IPAIMDTYPV DQGPKQTGIV KHDILPTTGL ATLRISTPLE |
| 1321 | SYLLQELIVT RELSAKHSLL SSADVSSSRF LNFGIRDPAQ IVQDKTSVSH MPIRTSAATL |
| 1381 | GFFFPDRRAR TPFIMSSLMS DFIFPTQSLL FENCQTVALS ATPTTSVIRS IPGADIELNR |
| 1441 | QSLLSRGFLL IAASISATPV VSRGAQEDIE EYSADSLISR REHWRLLSPS MSPIFPAKVI |
| 1501 | ISKQVTILNS SALHRFSTKA FNPSEYQAIT EASSNQRLTN IKSQAADSLR ELSQTCATCS |
| 1561 | MTEIKSSREF SDQVLHSKQS HFYETFWMNS AILASWYALM GAQTITSGHS FSSATEITPS |
| 1621 | VAFTEVPSLF PSKKSAKRTI LSSSLEESIT LSSNLDVNLC LDKTCLSIVP SQTISSDLMN |
| 1681 | SDLTSKMTTD ELSVSENILK LLKIRQYGIT MGPTEVLNQE SLLDMEKSKG SHTLFKLHPS |
| 1741 | DSSLDFELNL QIYPDVTLKT YSEITHANDF KNNLPPLTGS VPDFSEVTTN VAFYTVSATP |
| 1801 | ALSIQTSSSM SVIRPDWPYF TDYMTSLKKE VKTSSEWSKW ELQPSVQYQE FPTASRHLPF |
| 1861 | TRSLTLSSLE SILAPQRLMI SDFSCVRYYG DSYLEFQNVA LNPQNNISLE FQTFSSYGLL |
| 1921 | LHVKQDSNLV DGFFIQLFIE NGTLKYHFYC PGEAKFKSIN TTVRVDNGQK YTLLIRQELD |
| 1981 | PCNAELTILG RNTQICESIN HVLGKPLPKS GSVFIGGFPD LHGKIQMPVP VKNFTGCIEV |
| 2041 | IEINNWRSFI PSKAVKNYHI NNCRSQGFML SPTASFVDAS DVTQGVDTMW TSVSPSVAAP |
| 2101 | SVCQQDVCHN GGTCHAIFLS SGIVSFQCDC PLHFTGRFCE KDAGLFFPSF NGNSYLELPF |
| 2161 | LKFVLEKEHN RTVTIYLTIK TNSLNGTILY SNGNNCGKQF LHLFLVEGRP SVKYGCGNSQ |
| 2221 | NILTVSANYS INTNAFTPIT IRYTTPVGSP GVVCMIEMTA DGKPPVQKKD TEISHASQAY |
| 2281 | FESMFLGHIP ANVQIHKKAG PVYGFRGCIL DLQVNNKEFF IIDEARHGKN IENCHVPWCA |
| 2341 | HHLCRNNGTC ISDNENLFCE CPRLYSGKLC QFASCENNPC GNGATCVPKS GTDIVCLCPY |
| 2401 | GRSGPLCTDA INITQPRFSG TDAFGYTSFL AYSRISDISF RYEFHLKFQL ANNHSALQNN |
| 2461 | LIFFTEQKGH GLNGDDFLAV GLLNGSVVYS YNLGSGIASI RSEPLNLSLG VHTVHLGKFF |
| 2521 | QEGWLKVDDH KNKSIIAPGR LVGLNVFSQF YVGGYSEYTP DLLPNGADFK NGFQGCIFTL |
| 2581 | QVRTEKDGHF RGLGNPEGHP NAGRSVGQCH ASPCSLMKCG NGGTCIESGT SVYCNCTTGW |
| 2641 | KGSFCTETVS TCDPEHDPPH HCSRGATCIS LPHGYTCFCP LGTTGIYCEQ ALILIVILEK |
| 2701 | PKPAERKVKK EALSISDPSF RSNELSWMSF ASFHVRKKTH IQLQFQPLAA DGILFYAAQH |
| 2761 | LKAQSGDFLC ISLVNSSVQL RYNLGDRTII LETLQKVTIN GSTWHIIKAG RVGAEGYLDL |
| 2821 | DGINVTEKAS TKMSSLDTNT DFYIGGVSSL NLVNPMAIEN EPVGFQGCIR QVIINNQELQ |
| 2881 | LTEFGAKGGS NVGDCDGTAC GYNTCRNGGE CTVNGTTFSC RCLPDWAGNT CNQSVSCLNN |
| 2941 | LCLHQSLCIP DQSFSYSCLC TLGWVGRYCE NKTSFSTAKF MGNSYIKYID PNYRMRNLQF |
| 3001 | TTISLNFSTT KTEGLIVWMG IAQNEENDFL AIGLHNQTLK IAVNLGERIS VPMSYNNGTF |
| 3061 | CCNKWHHVVV IQNQTLIKAY INNSLILSED IDPHKNFVAL NYDGICYLGG FEYGRKVNIV |
| 3121 | TQEIFKTNFV GKIKDVVFFQ EPKNIELIKL EGYNVYDGDE QNEVT |

SEQ ID NO: 160
FAM161 CENTROSOMAL PROTEIN A (FAM161A), ISOFORM 1
NP_001188472.1

| | |
|---|---|
| 1 | MATSHRVAKL VASSLQTPVN PITGARVAQY EREDPLKALA AAEAILEDEE EEKVAQPAGA |
| 61 | SADLNTSFSG VDEHAPISYE DFVNFPDIHH SNEEYFKKVE ELKAAHIETM AKLEKMYQDK |
| 121 | LHLKEVQPVV IREDSLSDSS RSVSEKNSYH PVSLMTSFSE PDLGQSSSLY VSSSEEELPN |
| 181 | LEKEYPRKNR MMTYAKELIN NMWTDFCVED YIRCKDTGFH AAEKRRKKRK EWVPTITVPE |
| 241 | PFQMMIREQK KKEESMKSKS DIEMVHKALK KQEEDPEYKK KFRANPVPAS VFLPLYHDLV |
| 301 | KQKEERRRSL KEKSKEALLA SQKPFKFIAR EEQKRAAREK QLRDFLKYKK KTNRFKARPI |
| 361 | PRSTYGSTTN DKLKEEELYR NLRTQLRAQE HLQNSSPLPC RSACGCRNPR CPEQAVKLKC |
| 421 | KHKVRCPTPD FEDLPERYQK HLSEHKSPKL LTVCKPFDLH ASPHASIKRE KILADIEADE |
| 481 | ENLKETRWPY LSPRRKSPVR CAGVNPVPCN CNPPVPTVSS RGREQAVRRS LEEKKMLEEE |
| 541 | RNRILTKQKQ RMKELQKLLT TRAKAYDSHQ SLAQISKSRV KCLRKSEKER MREYQRELEE |
| 601 | REEKLKKRPL LFERVAQKNA RMAAEKHYSN TLKALGISDE FVSKKGQSGK VLEYFNNQET |
| 661 | KSVTEDKESF NEEEKIEERE NGEENYFIDT NSQDSYKEKD EANEESEEEK SVEESH |

SEQ ID NO: 161
FAM161 CENTROSOMAL PROTEIN A (FAM161A), ISOFORM 2
NP_115556.2

| | |
|---|---|
| 1 | MATSHRVAKL VASSLQTPVN PITGARVAQY EREDPLKALA AAEAILEDEE EEKVAQPAGA |
| 61 | SADLNTSFSG VDEHAPISYE DFVNFPDIHH SNEEYFKKVE ELKAAHIETM AKLEKMYQDK |
| 121 | LHLKEVQPVV IREDSLSDSS RSVSEKNSYH PVSLMTSFSE PDLGQSSSLY VSSSEEELPN |
| 181 | LEKEYPRKNR MMTYAKELIN NMWTDFCVED YIRCKDTGFH AAEKRRKKRK EWVPTITVPE |
| 241 | PFQMMIREQK KKEESMKSKS DIEMVHKALK KQEEDPEYKK KFRANPVPAS VFLPLYHDLV |
| 301 | KQKEERRRSL KEKSKEALLA SQKPFKFIAR EEQKRAAREK QLRDFLKYKK KTNRFKARPI |
| 361 | PRSTYGSTTN DKLKEEELYR NLRTQLRAQE HLQNSSPLPC RSACGCRNPR CPEQAVKLKC |
| 421 | KHKVRCPTPD FEDLPERYQK HLSEHKSPKL LTVCKPFDLH ASPHASIKRE KILADIEADE |
| 481 | ENLKETRWPY LSPRRKSPVR CAGVNPVPCN CNPPVPTVSS RGREQAVRKS EKERMREYQR |
| 541 | ELEEREEKLK KRPLLFERVA QKNARMAAEK HYSNTLKALG ISDEFVSKKG QSGKVLEYFN |
| 601 | NQETKSVTED KESFNEEEKI EERENGEENY FIDTNSQDSY KEKDEANEES EEEKSVEESH |

SEQ ID NO: 162
MER PROTO-ONCOGENE, TYROSINE KINASE (MERTK);
Q12866.2

| | |
|---|---|
| 1 | MGPAPLPLLL GLFLPALWRR AITEAREEAK PYPLFPGPFP GSLQTDHTPL LSLPHASGYQ |
| 61 | PALMFSPTQP GRPHTGNVAI PQVTSVESKP LPPLAFKHTV GHIILSEHKG VKFNCSISVP |
| 121 | NIYQDTTISW WKDGKELLGA HHAITQFYPD DEVTAIIASF SITSVQRSDN GSYICKMKIN |
| 181 | NEEIVSDPIY IEVQGLPHFT KQPESMNVTR NTAFNLTCQA VGPPEPVNIF WVQNSSRVNE |
| 241 | QPEKSPSVLT VPGLTEMAVF SCEAHNDKGL TVSKGVQINI KAIPSPPTEV SIRNSTAHSI |
| 301 | LISWVPGFDG YSPFRNCSIQ VKEADPLSNG SVMIFNISAL PHLYQIKQLQ ALANYSIGVS |
| 361 | CMNEIGWSAV SPWILASTTE GAPSVAPLNV TVFLNESSDN VDIRWMKPPT KQQDGELVGY |
| 421 | RISHVWQSAG ISKELLEEVG QNGSRARISV QVHNATCTVR IAAVTRGGVG PFSDPVKIFI |
| 481 | PAHGWVDYAP SSTPAPGNAD PVLIIFGCFC GFILIGLILY ISLAIRKRVQ ETKFGNAFTE |
| 541 | EDSELVVNYI AKKSFCRRAI ELTLHSLGVS EELQNKLEDV VIDRNLLILG KILGEGEFGS |
| 601 | VMEGNLKQED GTSLKVAVKT MKLDNSSQRE IEEFLSEAAC MKDFSHPNVI RLLGVCIEMS |
| 661 | SQGIPKPMVI LPFMKYGDLH TYLLYSRLET GPKHIPLQTL LKFMVDIALG MEYLSNRNFL |
| 721 | HRDLAARNCM LRDDMTVCVA DFGLSKKIYS GDYYRQGRIA KMPVKWIAIE SLADRVYTSK |
| 781 | SDVWAFGVTM WEIATRGMTP YPGVQNHEMY DYLLHGHRLK QPEDCLDELY EIMYSCWRTD |
| 841 | PLDRPTFSVL RLQLEKLLES LPDVRNQADV IYVNTQLLES SEGLAQGSTL APLDLNIDPD |
| 901 | SIIASCTPRA AISVVTAEVH DSKPHEGRYI LNGGSEEWED LTSAPSAAVT AEKNSVLPGE |
| 961 | RLVRNGVSWS HSSMLPLGSS LPDELLFADD SSEGSEVLM |

SEQ ID NO: 163
PHOSPHODIESTERASE 6B (PDE6B)
AAH00249.1

| | |
|---|---|
| 1 | MSLSEEQARS FLDQNPDFAR QYFGKKLSPE NVAAACEDGC PPDCDSLRDL CQVEESTALL |
| 61 | ELVQDMQESI NMERVVFKVL RRLCTLLQAD RCSLFMYRQR NGVAELATRL FSVQPDSVLE |
| 121 | DCLVPPDSEI VFPLDIGVVG HVAQTKKMVN VEDVAECPHF SSFADELTDY KTKNMLATPI |
| 181 | MNGKDVVAVI MAVNKLNGPF FTSEDEDVFL KYLNFATLYL KIYHLSYLHN CETRRGQVLL |
| 241 | WSANKVFEEL TDIERQFHKA FYTVRAYLNC ERYSVGLLDM TKEKEFFDVW SVLMGESQPY |
| 301 | SGPRTPDGRE IVFYKVIDYI LHGKEEIKVI PTPSADHWAL ASGLPSYVAE SGFICNIMNA |
| 361 | SADEMFKFQE GALDDSGWLI KNVLSMPIVN KKEEIVGVAT FYNRKDGKPF DEQDEVLMES |
| 421 | LTQFLGWSVM NTDTYDKMNK LENRKDIAQD MVLYHVKCDR DEIQLILPTR ARLGKEPADC |
| 481 | DEDELGEILK EELPGPTTFD IYEFHFSDLE CTELDLVKCG IQMYYELGVV RKFQIPQEVL |
| 541 | VRFLFSISKG YRRITYHNWR HGFNVAQTMF TLLMTGKLKS YYTDLEAFAM VTAGLCHDID |
| 601 | HRGTNNLYQM KSQNPLAKLH GSSILERHHL EFGKFLLSEE TLNIYQNLNR RQHDHVIHLM |
| 661 | DIAIIATDLA LYFKKRAMFQ KIVDESKNYQ DKKSWVEYLS LETTRKEIVM AMMMTACDLS |
| 721 | AITKPWEVQS KVALLVAAEF WEQGDLERTV LDQQPIPMMD RNKAAELPKL QVGFIDFVCT |
| 781 | FVYKEFSRFH EEILPMFDRL QNNRKEWKAL ADEYEAKVKA LEEKEEEERV AAKKGTEICN |
| 841 | GGPAPKSSTC CIL |

SEQ ID NO: 164
PHOSPHODIESTERASE 6B (PDE6B), ISOFORM CRA_A
EAW82661.1

| | |
|---|---|
| 1 | MSLSEEQARS FLDQNPDFAR QYFGKKLSPE NVAAACEDGC PPDCDSLRDL CQVEESTALL |
| 61 | ELVQDMQESI NMERVVFKVL RRLCTLLQAD RCSLFMYRQR NGVAELATRL FSVQPDSVLE |
| 121 | DCLVPPDSEI VFPLDIGVVG HVAQTKKMVN VEDVAECPHF SSFADELTDY KTKNMLATPI |
| 181 | MNGKDVVAVI MAVNKLNGPF FTSEDEDVFL KYLNFATLYL KIYHLSYLHN CETRRGQVLL |
| 241 | WSANKVFEEL TDIERQFHKA FYTVRAYLNC ERYSVGLLDM TKEKEFFDVW SVLMGESQPY |
| 301 | SGPRTPDGRE IVFYKVIDYI LHGKEEIKVI PTPSADHWAL ASGLPSYVAE SGFICNIMNR |
| 361 | SADEMFKFQE GALDDSGWLI KNVLSMPIVN KKEEIVGVAT FYNRKDGKPF DEQDEVLMES |
| 421 | LTQFLGWSVM NTDTYDKMNK LENRKDIAQD MVLYHVKCDR DEIQLILPTR ARLGKEPADC |
| 481 | DEDELGEILK EELPGPTTFD IYEFHFSDLE CTELDLVKCG IQMYYELGVV RKFQIPQEVL |
| 541 | VRFLFSISKG YRRITYHNWR HGFNVAQTMF TLLMTGKLKS YYTDLEAFAM VTAGLCHDID |
| 601 | HRGTNNLYQM KSQNPLAKLH GSSILERHHL EFGKFLLSEE TLNIYQNLNR RQHEHVIHLM |
| 661 | DIAIIATDLA LYFKKRAMFQ KIVDESKNYQ DKKSWVEYLS LETTRKEIVM AMMMTACDLS |
| 721 | AITKPWEVQS KVALLVAAEF WEQGDLERTV LDQQPIPMMD RNKAAELPKL QVGFIDFVCT |
| 781 | FVYKAILSFP RRDPAHVRPT AEQ |

SEQ ID NO: 165
PHOSPHODIESTERASE 6B (PDE6B), ISOFORM CRA_B
EAW82662.1

| | |
|---|---|
| 1 | MSLSEEQARS FLDQNPDFAR QYFGKKLSPE NVAAACEDGC PPDCDSLRDL CQVEESTALL |
| 61 | ELVQDMQESI NMERVVFKVL RRLCTLLQAD RCSLFMYRQR NGVAELATRL FSVQPDSVLE |
| 121 | DCLVPPDSEI VFPLDIGVVG HVAQTKKMVN VEDVAECPHF SSFADELTDY KTKNMLATPI |
| 181 | MNGKDVVAVI MAVNKLNGPF FTSEDEDVFL KYLNFATLYL KIYHLSYLHN CETRRGQVLL |
| 241 | WSANKVFEEL TDIERQFHKA FYTVRAYLNC ERYSVGLLDM TKEKEFFDVW SVLMGESQPY |
| 301 | SGPRTPDGRE IVFYKVIDYI LHGKEEIKVI PTPSADHWAL ASGLPSYVAE SGFVLVRFLF |
| 361 | SISKGYRRIT YHNWRHGFNV AQTMFTLLMT GKLKSYYTDL EAFAMVTAGL CHDIDHRGTN |
| 421 | NLYQMKSQNP LAKLHGSSIL ERHHLEFGKF LLSEETLNIY QNLNRRQHEH VIHLMDIAII |
| 481 | ATDLALYFKK RAMFQKIVDE SKNYQDKKSW VEYLSLETTR KEIVMAMMMT ACDLSAITKP |
| 541 | WEVQSKVALL VAAEFWEQGD LERTVLDQQP IPMMDRNKAA ELPKLQVGFI DEVCIFVYKA |
| 601 | SGSRVRHRNL QWRPSTQVFN LLYPVSTVPW DPMAPSIFTH |

SEQ ID NO: 166
PROMININ 1 (PROM1)
O43490.1

| | |
|---|---|
| 1 | MALVLGSLLL LGLCGNSFSG GQPSSTDAPK AWNYELPATN YETQDSHKAG PIGILFELVH |
| 61 | IFLYVVQPRD FPEDTLRKFL QKAYESKIDY DKPETVILGL KIVYYEAGII LCCVLGLLFI |
| 121 | ILMPLVGYFF CMCRCCNKCG GEMHQRQKEN GPFLRKCFAI SLLVICIIIS IGIFYGFVAN |
| 181 | HQVRTRIKRS RKLADSNFKD LRTLLNETPE QIKYILAQYN TTKDKAFTDL NSINSVLGGG |
| 241 | ILDRLRPNII PVLDEIKSMA TAIKETKEAL ENMNSTLKSL HQQSTQLSSS LTSVKTSLRS |
| 301 | SLNDPLCLVH PSSETCNSIR LSLSQLNSNP ELRQLPPVDA ELDNVNNVLR TDLDGLVQQG |
| 361 | YQSLNDIPDR VQRQTTTVVA GIKRVLNSIG SDIDNVTQRL PIQDILSAFS VYVNNTESYI |
| 421 | HRNLPTLEEY DSYWWLGGLV ICSLLTLIVI FYYLGLLCGV CGYDRHATPT TRGCVSNTGG |
| 481 | VFLMVGVGLS FLFCWILMII VVLTFVFGAN VEKLICEPYT SKELFRVLDT PYLLNEDWEY |
| 541 | YLSGKLFNKS KMKLTFEQVY SDCKKNRGTY GTLHLQNSFN ISEHLNINEH TGSISSELES |
| 601 | LKVNLNIFLL GAAGRKNLQD FAACGIDRMN YDSYLAQTGK SPAGVNLLSF AYDLEAKANS |
| 661 | LPPGNLRNSL KRDAQTIKTI HQQRVLPIEQ SLSTLYQSVK ILQRTGNGLL ERVTRILASL |
| 721 | DFAQNFITNN TSSVIIEETK KYGRTIIGYF EHYLQWIEFS ISEKVASCKP VATALDTAVD |
| 781 | VFLCSYIIDP LNLFWFGIGK ATVFLLPALI FAVKLAKYYR RMDSEDVYDD VETIPMKNME |
| 841 | NGNNGYHKDH VYGIHNPVMT SPSQH |

SEQ ID NO: 167
PROMININ 1 (PROM1), ISOFORM CRA_A
EAW92750.1

| | |
|---|---|
| 1 | MALVLGSLLL LGLCGNSFSG GQPSSTDAPK AWNYELPATN YETQDSHKAG PIGILFELVH |
| 61 | IFLYVVQPRD FPEDTLRKFL QKAYESKIDY DKIVYYEAGI ILCCVLGLLF IILMPLVGYF |
| 121 | FCMCRCCNKC GGEMHQRQKE NGPFLRKCFA ISLLVICIII SIGIFYGFVA NHQVRTRIKR |
| 181 | SRKLADSNFK DLRTLLNETP EQIKYILAQY NTIKDKAFTD LNSINSVLGG GILDRLRPNI |
| 241 | IPVLDEIKSM ATAIKETKEA LENMNSTLKS LHQQSTQLSS SLTSVKTSLR SSLNDPLCLV |
| 301 | HPSSETCNSI RLSLSQLNSN PELRQLPPVD AELDNVNNVL RTDLDGLVQQ GYQSLNDIPD |
| 361 | RVQRQTTTVV AGIKRVLNSI GSDIDNVTQR LPIQDILSAF SVYVNNTESY IHRNLPTLEE |
| 421 | YDSYWWLGGL VICSLLTLIV IFYYLGLLCG VCGYDRHATP TTRGCVSNTG GVFLMVGVGL |
| 481 | SFLFCWILMI IVVLTFVFGA NVEKLICEPY TSKELFRVLD TPYLLNEDWE YYLSGKLFNK |
| 541 | SKMKLTFEQV YSDCKKNRGT YGTLHLQNSF NISEHLNINE HTGSISSELE SLKVNLNIFL |
| 601 | LGAAGRKNLQ DFAACGIDRM NYDSYLAQTG KSPAGVNLLS FAYDLEAKAN SLPPGNLRNS |
| 661 | LKRDAQTIKT IHQQRVLPIE QSLSTLYQSV KILQRTGNGL LERVTRILAS LDFAQNFITN |
| 721 | NTSSVIIEET KKYGRTIIGY FEHYLQWIEF SISEKVASCK PVATALDTAV DVFLCSYIID |
| 781 | PLNLFWFGIG KATVFLLPAL IFAVKLAKYY RRMDSEDVYD DVETIPMKNM ENGNNGYHKD |
| 841 | HVYGIHNPVM TSPSQH |

SEQ ID NO: 168
PROMININ 1 (PROM1), ISOFORM CRA_B
EAW92751.1

| | |
|---|---|
| 1 | MFHLEMACKS NHRETCVTPS DKFKREREIL REKCCSFKSG VVLTDANYGV QFNRVFCCIR |
| 61 | ININWSAANM SIIRLVSSVL K |

SEQ ID NO: 169
PROMININ 1 (PROM1), ISOFORM CRA_C
EAW92752.1

| | |
|---|---|
| 1 | MALVLGSLLL LGLCGNSFSG GQPSSTDAPK AWNYELPATN YETQDSHKAG PIGILFELVH |
| 61 | IFLYVVQPRD FPEDTLRKFL QKAYESKIDY DKPETVILGL KIVYYEAGII LCCVLGLLFI |
| 121 | ILMPLVGYFF CMCRCCNKCG GEMHQRQKEN GPFLRKCFAI SLLVICIIIS IGIFYGFVAN |
| 181 | HQVRTRIKRS RKLADSNFKD LRTLLNETPE QIKYILAQYN TIKDKAFTDL NSINSVLGGG |
| 241 | ILDRLRPNII PVLDEIKSMA TAIKETKEAL ENMNSTLKSL HQQSTQLSSS LTSVKTSLRS |
| 301 | SLNDPLCLVH PSSETCNSIR LSLSQLNSNP ELRQLPPVDA ELDNVNNVLR TDLDGLVQQG |
| 361 | YQSLNDIPDR VQRQTTTVVA GIKRVLNSIG SDIDNVTQRL PIQDILSAFS VYVNNTESYI |
| 421 | HRNLPTLEEY DSYWWLGGLV ICSLLTLIVI FYYLGLLCGV CGYDRHATPT TRGCVSNTGG |
| 481 | VFLMVGVGLS FLFCWILMII VVLTFVFGAN VEKLICEPYT SKELFRVLDT PYLLNEDWEY |
| 541 | YLSGKLFNKS KMKLTFEQVY SDCKKNRGTY GTLHLQNSFN ISEHLNINEH TGSISSELES |
| 601 | LKVNLNIFLL GAAGRKNLQD FAACGIDRMN YDSYLAQTGK SPAGVNLLSF AYDLEAKANS |
| 661 | LPPGNLRNSL KRDAQTIKTI HQQRVLPIEQ SLSTLYQSVK ILQRTGNGLL ERVTRILASL |
| 721 | DFAQNFITNN TSSVIIEETK KYGRTIIGYF EHYLQWIEFS ISEKVASCKP VATALDTAVD |
| 781 | VFLCSYIIDP LNLFWFGIGK ATVFLLPALI FAVKLAKYYR RMDSEDVYDD VETIPMKNME |
| 841 | NGNNGYHKDH VYGIHNPVMT SPSQH |

SEQ ID NO: 170
PHOSPHODIESTERASE 6A (PDE6A)
AAH35909.1

| | |
|---|---|
| 1 | MGEVTAEEVE KFLDSNIGFA KQYYNLHYRA KLISDLLGAK EAAVDFSNYH SPSSMEESEI |
| 61 | IFDLLRDFQE NLQTEKCIFN VMKKLCFLLQ ADRMSLFMYR TRNGIAELAT RLFNVHKDAV |
| 121 | LEDCLVMPDQ EIVFPLDMGI VGHVAHSKKI ANVPNTEEDE HFCDFVDILT EYKTKNILAS |
| 181 | PIMNGKDVVA IIMAVNKVDG SHFTKRDEEI LLKYLNFANL IMKVYHLSYL HNCETRRGQI |
| 241 | LLWSGSKVFE ELTDIERQFH KALYTVRAFL NCDRYSVGLL DMTKQKEFFD VWPVLMGEVP |
| 301 | PYSGPRTPDG REINFYKVID YILHGKEDIK VIPNPPPDHW ALVSGLPAYV AQNGLICNIM |
| 361 | NAPAEDFFAF QKEPLDESGW MIKNVLSMPI VNKKEEIVGV ATFYNRKDGK PFDEMDETLM |
| 421 | ESLTQFLGWS VLNPDTYESM NKLENRKDIF QDIVKYHVKC DNEEIQKILK TREVYGKEPW |
| 481 | ECEEEELAEI LQAELPDADK YEINKFHFSD LPLTELELVK CGIQMYYELK VVDKFHIPQE |
| 541 | ALVRFMYSLS KGYRKITYHN WRHGFNVGQT MFSLLVTGKL KRYFTDLEAL AMVTAAFCHD |
| 601 | IDHRGTNNLY QMKSQNPLAK LHGSSILERH HLEFGKTLLR DESLNIFQNL NRRQHEHAIH |
| 661 | MMDIAIIATD LALYFKKRTM FQKIVDQSKT YESEQEWTQY MMLEQTRKEI VMAMMMTACD |
| 721 | LSAITKPWEV QSQVALLVAA EFWEQGDLER TVLQQNPIPM MDRNKADELP KLQVGFIDFV |
| 781 | CTFVYKEFSR FHEEITPMLD GITNNRKEWK ALADEYDAKM KVQEEKKQKQ QSAKSAAAGN |
| 841 | QPGGNPSPGG ATTSKSCCIQ |

SEQ ID NO: 171
PHOSPHODIESTERASE 6A (PDE6A), ISOFORM CRA_A
EAW61756.1

| | |
|---|---|
| 1 | MVTAAFCHDI DHRGTNNLYQ MKSQNPLAKL HGSSILERHH LEFGKTLLRD ESLNIFQNLN |
| 61 | RRQHEHAIHM MDIAIIATDL ALYFKKRTMF QKIVDQSKTY ESEQEWTQYM MLEQTRKEIV |
| 121 | MAMMMTACDL SAITKPWEVQ SQVALLVAAE FWEQGDLERT VLQQNPIPMM DRNKADELPK |
| 181 | LQVGFIDFVC TFVYKEFSRF HEEITPMLDG ITNNRKEWKA LADEYDAKMK VQEEKKQKQQ |
| 241 | SAKSAAAGNQ PGGNPSPGGA TTSKSCCIQ |

SEQ ID NO: 172
PHOSPHODIESTERASE 6A (PDE6A), ISOFORM CRA_B
EAW61757.1

| | |
|---|---|
| 1 | MGEVTAEEVE KFLDSNIGFA KQYYNLHYRA KLISDLLGAK EAAVDFSNYH SPSSMEESEI |
| 61 | IFDLLRDFQE NLQTEKCIFN VMKKLCFLLQ ADRMSLFMYR TRNGIAELAT RLFNVHKDAV |
| 121 | LEDCLVMPDQ EIVFPLDMGI VGHVAHSKKI ANVPNTEEDE HFCDFVDILT EYKTKNILAS |
| 181 | PIMNGKDVVA IIMAVNKVDG SHFTKRDEEI LLKYLNFANL IMKVYHLSYL HNCETRRGQI |
| 241 | LLWSGSKVFE ELTDIERQFH KALYTVRAFL NCDRYSVGLL DMTKQKEFFD VWPVLMGEVP |
| 301 | PYSGPRTPDG REINFYKVID YILHGKEDIK VIPNPPPDHW ALVSGLPAYV AQNGLICNIM |
| 361 | NAPAEDFFAF QKEPLDESGW MIKNVLSMPI VNKKEEIVGV ATFYNRKDGK PFDEMDETLM |
| 421 | ESLTQFLGWS VLNPDTYESM NKLENRKDIF QDIVKYHVKC DNEEIQKILK TREVYGKEPW |
| 481 | ECEEEELAEI LQAELPDADK YEINKFHFSD LPLTELELVK CGIQMYYELK VVDKFHIPQE |
| 541 | ALVRFMYSLS KGYRKITYHN WRHGFNVGQT MFSLLVTGKL KRYFTDLEAL AMVTAAFCHD |
| 601 | IDHRGTNNLY QMKSQNPLAK LHGSSILERH HLEFGKTLLR DESLNIFQNL NRRQHEHAIH |
| 661 | MMDIAIIATD LALYFKKRTM FQKIVDQSKT YESEQEWTQY MMLEQTRKEI VMAMMMTACD |
| 721 | LSAITKPWEV QSQVALLVAA EFWEQGDLER TVLQQNPIPM MDRNKADELP KLQVGFIDFV |
| 781 | CTFVYKEFSR FHEEITPMLD GITNNRKEWK ALADEYDAKM KVQEEKKQKQ QSAKSAAAGN |
| 841 | QPGGNPSPGG ATTSKSCCIQ |

SEQ ID NO: 173
INTERPHOTORECEPTOR MATRIX PROTEOGLYCAN 2 (IMPG2)
EAW79803.1

| | |
|---|---|
| 1 | MIMFPLFGKI SLGILIFVLI EGDFPSLTAQ TYLSIEEIQE PKSAVSFLLP EESTDLSLAT |
| 61 | KKKQPLDRRE TERQWLIRRR RSILFPNGVK ICPDESVAEA VANHVKYFKV RVCQEAVWEA |
| 121 | FRTFWDRLPG REEYHYWMNL CEDGVTSIFE MGTNFSESVE HRSLIMKKLT YAKETVSSSE |
| 181 | LSSPVPVGDT STLGDTTLSV PHPEVDAYEG ASESSLERPE ESISNEIENV IEEATKPAGE |
| 241 | QIAEFSIHLL GKQYREELQD SSSFHHQHLE EEFISEVENA FTGLPGYKEI RVLEFRSPKE |
| 301 | NDSGVDVYYA VTFNGEAISN TTWDLISLHS NKVENHGLVE LDDKPTVVYT ISNFRDYIAE |
| 361 | TLQQNFLLGN SSLNPDPDSL QLINVRGVLR HQTEDLVWNT QSSSLQATPS SILDNTFQAA |
| 421 | WPSADESITS SIPPLDFSSG PPSATGRELW SESPLGDLVS THKLAFPSKM GLSSSPEVLE |
| 481 | VSSLTLHSVT PAVLQTGLPV ASEERTSGSH LVEDGLANVE ESEDFLSIDS LPSSSFTQPV |
| 541 | PKETIPSMED SDVSLTSSPY LTSSIPFGLD SLTSKVKDQL KVSPFLPDAS MEKELIFDGG |
| 601 | LGSGSGQKVD LITWPWSETS SEKSAEPLSK PWLEDDDSLL PAEIEDKKLV LVDKMDSTDQ |
| 661 | ISKHSKYEHD DRSIHFPEEE PLSGPAVPIF ADTAAESASL TLPKHISEVP GVDDYSVTKA |
| 721 | PLILTSVAIS ASTDKSDQAD AILREDMEQI TESSNYEWFD SEVSMVKPDM QTLWTILPES |
| 781 | ERVWTRTSSL EKLSRDILAS TPQSADRLWL SVTQSTKLPP TTISTLLEDE VIMGVQDISL |
| 841 | ELDRIGTDYY QPEQVQEQNG KVGSYVEMST SVHSTEMVSV AWPTEGGDDL SYTQTSGALV |
| 901 | VFFSLRVTNM MFSEDLFNKN SLEYKALEQR FLELLVPYLQ SNLTGFQNLE ILNFRNGSIV |
| 961 | VNSRMKFANS VPPNVNNAVY MILEDFCTTA YNTMNLAIDK YSLDVESGDE ANPCKFQACN |
| 1021 | EFSECLVNPW SGEAKCRCFP GYLSVEERPC QSLCDLQPDF CLNDGKCDIM PGHGAICRCR |
| 1081 | VGENWWYRGK HCEEFVSEPV IIGITIASVV GLLVIFSAII YFFIRTLQAH HDRSERESPF |
| 1141 | SGSSRQPDSL SSIENAVKYN PVYESHRAGC EKYEGPYPQH PFYSSASGDV IGGLSREEIR |
| 1201 | QMYESSELSR EEIQERMRVL ELYANDPEFA AFVREQQVEE V |

SEQ ID NO: 174
MALE GERM CELL ASSOCIATED KINASE (MAK)
AAN16405.1

| | |
|---|---|
| 1 | MNRYTTMRQL GDGTYGSVLM GKSNESGELV AIKRMKRKFY SWDECMNLRE VKSLKKLNHA |
| 61 | NVIKLKEVIR ENDHLYFIFE YMKENLYQLM KDRNKLFPES VIRNIMYQIL QGLAFIHKHG |
| 121 | FFHRDMKPEN LLCMGPELVK IADFGLAREL RSQPPYTDYV STRWYRAPEV LLRSSVYSSP |
| 181 | IDVWAVGSIM AELYMLRPLF PGTSEVDEIF KICQVLGTPK KSDWPEGYQL ASSMNFRFPQ |
| 241 | CVPINLKTLI PNASNEAIQL MTEMLNWDPK KRPTASQALK HPYFQVGQVL GPSSNHLESK |
| 301 | QSLNKQLQPL ESKPSLVEVE PKPLPDIIDQ VVGQPQPKTS QQPLQPIQPP QNLSVQQPPK |
| 361 | QQSQEKPPQT LFPSIVKNMP TKPNGTLSHK SGRRRWGQTI FKSGDSWEEL EDYDFGASHS |
| 421 | KKPSMGVFKE KRKKDSPFRL PEPVPSGSNH STGENKSLPA VTSLKSDSEL STAPTSKQYY |
| 481 | LKQSRYLPGV NPKKVSLIAS GKEINPHTWS NQLFPKSLGP VGAELAFKRS NAGNLGSYAT |
| 541 | YNQSGYIPSF LKKEVQSAGQ RIHLAPLNAT ASEYTWNTKT GRGQFSGRTY NPTAKNLNIV |
| 601 | NRAQPIPSVH GRTDWVAKYG GHR |

SEQ ID NO: 175
MALE GERM CELL ASSOCIATED KINASE (MAK); RETINAL-ENRICHED ISOFORM
AEL29206.1

| | |
|---|---|
| 1 | MNRYTTMRQL GDGTYGSVLM GKSNESGELV AIKRMKRKFY SWDECMNLRE VKSLKKLNHA |
| 61 | NVIKLKEVIR ENDHLYFIFE YMKENLYQLM KDRNKLFPES VIRNIMYQIL QGLAFIHKHG |
| 121 | FFHRDMKPEN LLCMGPELVK IADFGLAREL RSQPPYTDYV STRWYRAPEV LLRSSVYSSP |
| 181 | IDVWAVGSIM AELYMLRPLF PGTSEVDEIF KICQVLGTPK KSDWPEGYQL ASSMNFRFPQ |
| 241 | CVPINLKTLI PNASNEAIQL MTEMLNWDPK KRPTASQALK HPYFQVGQVL GPSSNHLESK |
| 301 | QSLNKQLQPL ESKPSLVEVE PKPLPDIIDQ VVGQPQPKTS QQPLQPIQPP QNLSVQQPPK |
| 361 | QQSQEKPPQT LFPSIVKNMP TKPNGTLSHK SGRRRWGQTI FKSGDSWEEL EDYDFGASHS |
| 421 | KKPSMGVFKE KRKKDSPFRL PEPVPSGSNH STGENKSLPA VTSLKSDSEL STAPTSKQYY |
| 481 | LKQSRYLPGV NPKKVSLIAS GKEINPHTWS NQLFPKSLGP VGAELAFKRS NAEESIIKPI |
| 541 | EKLSCNETFP EKLEDPQGNL GSYATYNQSG YIPSFLKKEV QSAGQRIHLA PLNATASEYT |
| 601 | WNTKTGRGQF SGRTYNPTAK NLNIVNRAQP IPSVHGRTDW VAKYGGHR |

SEQ ID NO: 176
INTRAFLAGELLAR TRANSPORT 140 (IFT140)
NP_055529.2

| | |
|---|---|
| 1 | MALYYDHQIE APDAAGSPSF ISWHPVHPFL AVAYISTTST GSVDIYLEQG ECVPDTHVER |
| 61 | PFRVASLCWH PTRLVLAVGW ETGEVTVFNK QDKEQHTMPL THTADITVLR WSPSGNCLLS |
| 121 | GDRLGVLLLW RLDQRGRVQG TPLLKHEYGK HLTHCIFRLP PPGEDLVQLA KAAVSGDEKA |
| 181 | LDMFNWKKSS SGSLLKMGSH EGLLFFVSLM DGTVHYVDEK GKTTQVVSAD STIQMLFYME |
| 241 | KREALVVVTE NLRLSLYTVP PEGKAEEVMK VKLSGKTGRR ADIALIEGSL LVMAVGEAAL |
| 301 | RFWDIERGEN YILSPDEKFG FEKGENMNCV CYCKVKGLLA AGTDRGRVAM WRKVPDFLGS |
| 361 | PGAEGKDRWA LQTPTELQGN ITQIQWGSRK NLLAVNSVIS VAILSERAMS SHFHQQVAAM |
| 421 | QVSPSLLNVC FLSTGVAHSL RTDMHISGVF ATKDAVAVWN GRQVAIFELS GAAIRSAGTF |
| 481 | LCETPVLAMH EENVYTVESN RVQVRTWQGT VKQLLLFSET EGNPCFLDIC GNFLVVGTDL |
| 541 | AHFKSFDLSR REAKAHCSCR SLAELVPGVG GIASLRCSSS GSTISILPSK ADNSPDSKIC |
| 601 | FYDVEMDTVT VFDFKTGQID RRETLSFNEQ ETNKSHLFVD EGLKNYVPVN HFWDQSEPRL |
| 661 | FVCEAVQETP RSQPQSANGQ PQDGRAGPAA DVLILSFFIS EEHGFLLHES FPRPATSHSL |
| 721 | LGMEVPYYYF TRKPEEADRE DEVEPGCHHI PQMVSRRPLR DFVGLEDCDK ATRDAMLHFS |
| 781 | FFVTIGDMDE AFKSIKLIKS EAVWENMARM CVKTQRLDVA KVCLGNMGHA RGARALREAE |
| 841 | QEPELEARVA VLATQLGMLE DAEQLYRKCK RHDLLNKFYQ AAGRWQEALQ VAEHHDRVHL |
| 901 | RSTYHRYAGH LEASADCSRA LSYYEKSDTH RFEVPRMLSE DLPSLELYVN KMKDKTLWRW |
| 961 | WAQYLESQGE MDAALHYYEL ARDHFSLVRI HCFQGNVQKA AQIANETGNL AASYHLARQY |
| 1021 | ESQEEVGQAV HFYTRAQAFK NAIRLCKENG LDDQLMNLAL LSSPEDMIEA ARYYEEKGVQ |
| 1081 | MDRAVMLYHK AGHFSKALEL AFATQQFVAL QLIAEDLDET SDPALLARCS DFFIEHSQYE |
| 1141 | RAVELLLAAR KYQEALQLCL GQNMSITEEM AEKMTVAKDS SDLPEESRRE LLEQIADCCM |
| 1201 | RQGSYHLATK KYTQAGNKLK AMRALLKSGD TEKITFFASV SRQKEIYIMA ANYLQSLDWR |
| 1261 | KEPEIMKNII GFYTKGRALD LLAGFYDACA QVEIDEYQNY DKAHGALTEA YKCLAKAKAK |
| 1321 | SPLDQETRLA QLQSRMALVK RFIQARRTYT EDPKESIKQC ELLLEEPDLD STIRIGDVYG |
| 1381 | FLVEHYVRKE EYQTAYRFLE EMRRRLPLAN MSYYVSPQAV DAVHRGLGLP LPRTVPEQVR |
| 1441 | HNSMEDAREL DEEVVEEADD DP |

SEQ ID NO: 177
HTRA SERINE PEPTIDASE 1 (HTRA1)
EAW49312.1

| | |
|---|---|
| 1 | MQIPRAALLP LLLLLLAAPA SAQLSRAGRS APLAAGCPDR CEPARCPPQP EHCEGGRARD |
| 61 | ACGCCEVCGA PEGAACGLQE GPCGEGLQCV VPFGVPASAT VRRRAQAGLC VCASSEPVCG |
| 121 | SDANTYANLC QLRAASRRSE RLHRPPVIVL QRGACGQGQE DPNSLRHKYN FIADVVEKIA |
| 181 | PAVVHIELFR KLPFSKREVP VASGSGFIVS EDGLIVTNAH VVTNKHRVKV ELKNGATYEA |
| 241 | KIKDVDEKAD IALIKIDHQG KLPVLLLGRS SELRPGEFVV AIGSPFSLQN TVTTGIVSTT |
| 301 | QRGGKELGLR NSDMDYIQTD AIINYGNSGG PLVNLDGEVI GINTLKVTAG ISFAIPSDKI |
| 361 | KKFLTESHDR QAKGKAITKK KYIGIRMMSL TSSKAKELKD RHRDFPDVIS GAYIIEVIPD |
| 421 | TPAEAGGLKE NDVIISINGQ SVVSANDVSD VIKRESTLNM VVRRGNEDIM ITVIPEEIDP |

SEQ ID NO: 178
BESTROPHIN 1 (BEST1), ISOFORM 1
NP_004174.1

| | |
|---|---|
| 1 | MTITYTSQVA NARLGSFSRL LLCWRGSIYK LLYGEFLIFL LCYYIIRFIY RLALTEEQQL |
| 61 | MFEKLTLYCD SYIQLIPISF VLGFYVTLVV TRWWNQYENL PWPDRLMSLV SGFVEGKDEQ |
| 121 | GRLLRRTLIR YANLGNVLIL RSVSTAVYKR FPSAQHLVQA GFMTPAEHKQ LEKLSLPHNM |
| 181 | FWVPWVWFAN LSMKAWLGGR IRDPILLQSL LNEMNTLRTQ CGHLYAYDWI SIPLVYTQVV |
| 241 | TVAVYSFFLT CLVGRQFLNP AKAYPGHELD LVVPVFTFLQ FFFYVGWLKV AEQLINPFGE |
| 301 | DDDDFETNWI VDRNLQVSLL AVDEMHQDLP RMEPDMYWNK PEPQPPYTAA SAQFRRASFM |
| 361 | GSTFNISLNK EEMEFQPNQE DEEDAHAGII GRFLGLQSHD HHPPRANSRT KLLWPKRESL |
| 421 | LHEGLPKNHK AAKQNVRGQE DNKAWKLKAV DAFKSAPLYQ RPGYYSAPQT PLSPTPMFFP |
| 481 | LEPSAPSKLH SVTGIDTKDK SLKTVSSGAK KSFELLSESD GALMEHPEVS QVRRKTVEFN |
| 541 | LTDMPEIPEN HLKEPLEQSP TNIHTTLKDH MDPYWALENR DEAHS |

SEQ ID NO: 179
BESTROPHIN 1 (BEST1), ISOFORM 2
NP_001132915.1

| | |
|---|---|
| 1 | MFEKLTLYCD SYIQLIPISF VLGFYVTLVV TRWWNQYENL PWPDRLMSLV SGFVEGKDEQ |
| 61 | GRLLRRTLIR YANLGNVLIL RSVSTAVYKR FPSAQHLVQA GFMTPAEHKQ LEKLSLPHNM |
| 121 | FWVPWVWFAN LSMKAWLGGR IRDPILLQSL LNEMNTLRTQ CGHLYAYDWI SIPLVYTQVV |
| 181 | TVAVYSFFLT CLVGRQFLNP AKAYPGHELD LVVPVFTFLQ FFFYVGWLKV AEQLINPFGE |
| 241 | DDDDFETNWI VDRNLQVSLL AVDEMHQDLP RMEPDMYWNK PEPQPPYTAA SAQFRRASFM |
| 301 | GSTFNISLNK EEMEFQPNQE DEEDAHAGII GRFLGLQSHD HHPPRANSRT KLLWPKRESL |
| 361 | LHEGLPKNHK AAKQNVRGQE DNKAWKLKAV DAFKSAPLYQ RPGYYSAPQT PLSPTPMFFP |
| 421 | LEPSAPSKLH SVTGIDTKDK SLKTVSSGAK KSFELLSESD GALMEHPEVS QVRRKTVEFN |
| 481 | LTDMPEIPEN HLKEPLEQSP TNIHTTLKDH MDPYWALENR SVLHLNQGHC IALCPTPASL |
| 541 | ALSLPFLHNF LGFHHCQSTL DLRPALAWGI YLATFTGILG KCSGPFLTSP WYHPEDFLGP |
| 601 | GEGR |

SEQ ID NO: 180
BESTROPHIN 1 (BEST1), ISOFORM 3
ALQ33849.1

| | |
|---|---|
| 1 | MFEKLTLYCD SYIQLIPISF VLGFYVTLVV TRWWNQYENL PWPDRLMSLV SGFVEGKDEQ |
| 61 | GRLLRRTLIR YANLGNVLIL RSVSTAVYKR FPSAQHLVQA GFMTPAEHKQ LEKLSLPHNM |
| 121 | FWVPWVWFAN LSMKAWLGGR IRDPILLQSL LNEMNTLRTQ CGHLYAYDWI SIPLVYTQVV |
| 181 | TVAVYSFFLT CLVGRQFLNP AKAYPGHELD LVVPVFTFLQ FFFYVGWLKV AEQLINPFGE |
| 241 | DDDDFETNWI VDRNLQVSLL AVDEMHQDLP RMEPDMYWNK PEPQPPYTAA SAQFRRASFM |
| 301 | GSTFNISLNK EEMEFQPNQE DEEDAHAGII GRFLGLQSHD HHPPRANSRT KLLWPKRESL |
| 361 | LHEGLPKNHK AAKQNVRGQE DNKAWKLKAV DAFKSAPLYQ RPGYYSAPQT PLSPTPMFFP |
| 421 | LEPSAPSKLH SVTGIDTKDK SLKTVSSGAK KSFELLSESD GALMEHPEVS QVRRKTVEFN |
| 481 | LTDMPEIPEN HLKEPLEQSP TNIHTTLKDH MDPYWALENR DEAHS |

SEQ ID NO: 181
BESTROPHIN 1 (BEST1), ISOFORM 4
NP_001287716.1

| | |
|---|---|
| 1 | MFEKLTLYCD SYIQLIPISF VLGFYVTLVV TRWWNQYENL PWPDRLMSLV SGFVEGKDEQ |
| 61 | GRLLRRTLIR YANLGNVLIL RSVSTAVYKR FPSAQHLVQA GFMTPAEHKQ LEKLSLPHNM |
| 121 | FWVPWVWFAN LSMKAWLGGR IRDPILLQSL LNEMNTLRTQ CGHLYAYDWI SIPLVYTQVA |
| 181 | EQLINPFGED DDDFETNWIV DRNLQVSLLA VDEMHQDLPR MEPDMYWNKP EPQPPYTAAS |
| 241 | AQFRRASFMG STFNISLNKE EMEFQPNQED EEDAHAGIIG RFLGLQSHDH HPPRANSRTK |
| 301 | LLWPKRESLL HEGLPKNHKA AKQNVRGQED NKAWKLKAVD AFKSAPLYQR PGYYSAPQTP |
| 361 | LSPTPMFFPL EPSAPSKLHS VTGIDTKDKS LKTVSSGAKK SFELLSESDG ALMEHPEVSQ |
| 421 | VRRKTVEFNL TDMPEIPENH LKEPLEQSPT NIHTTLKDHM DPYWALENRD EAHS |

SEQ ID NO: 182
BESTROPHIN 1 (BEST1), ISOFORM 5
NP_001350520.1

| | |
|---|---|
| 1 | MSLVSGFVEG KDEQGRLLRR TLIRYANLGN VLILRSVSTA VYKRFPSAQH LVQAGFMTPA |
| 61 | EHKQLEKLSL PHNMFWVPWV WFANLSMKAW LGGRIRDPIL LQSLLNEMNT LRTQCGHLYA |
| 121 | YDWISIPLVY TQVVTVAVYS FFLTCLVGRQ FLNPAKAYPG HELDLVVPVF TFLQFFFYVG |
| 181 | WLKVAEQLIN PFGEDDDDFE TNWIVDRNLQ VSLLAVDEMH QDLPRMEPDM YWNKPEPQPP |
| 241 | YTAASAQFRR ASFMGSTFNI SLNKEEMEFQ PNQEDEEDAH AGIIGRFLGL QSHDHHPPRA |
| 301 | NSRTKLLWPK RESLLHEGLP KNHKAAKQNV RGQEDNKAWK LKAVDAFKSA PLYQRPGYYS |
| 361 | APQTPLSPTP MFFPLEPSAP SKLHSVTGID TKDKSLKTVS SGAKKSFELL SESDGALMEH |
| 421 | PEVSQVRRKT VEFNLTDMPE IPENHLKEPL EQSPTNIHTT LKDHMDPYWA LENRSVLHLN |
| 481 | QGHCIALCPT PASLALSLPF LHNFLGFHHC QSTLDLRPAL AWGIYLATFT GILGKCSGPF |
| 541 | LTSPWYHPED FLGPGEGR |

SEQ ID NO: 183
BESTROPHIN 1 (BEST1), ISOFORM 6
NP_001350521.1

| | |
|---|---|
| 1 | MTITYTSQVA NARLGSFSRL LLCWRGSIYK LLYGEFLIFL LCYYIIRFIY RLALTEEQQL |
| 61 | MFEKLTLYCD SYIQLIPISF VLGFYVTLVV TRWWNQYENL PWPDRLMSLV SGFVEGKDEQ |
| 121 | GRLLRRTLIR YANLGNVLIL RSVSTAVYKR FPSAQHLVQA GFMTPAEHKQ LEKLSLPHNM |
| 181 | FWVPWVWFAN LSMKAWLGGR IRDPILLQSL LNEMNTLRTQ CGHLYAYDWI SIPLVYTQVV |
| 241 | TVAVYSFFLT CLVGRQFLNP AKAYPGHELD LVVPVFTFLQ FFFYVGWLKV GLSRALLGWR |
| 301 | HGQRGHGQQL PETRMQCQER KVSRVESSQA WWRTPVIPAT REAEAGESLE PGRRRLWWQS |
| 361 | SSSTPLERMM MILRPTGLST GICRCPCWLW MRCTRTCLGW SRTCTGISPS HSPPTQLLPP |
| 421 | SSVEPPLWAP PSTSA |

SEQ ID NO: 184
BESTROPHIN 1 (BEST1), ISOFORM 7
NP_001350522.1

| | |
|---|---|
| 1 | MHQDLPRMEP DMYWNKPEPQ PPYTAASAQF RRASFMGSTF NISLNKEEME FQPNQEDEED |
| 61 | AHAGIIGRFL GLQSHDHHPP RANSRTKLLW PKRESLLHEG LPKNHKAAKQ NVRGQEDNKA |
| 121 | WKLKAVDAFK SAPLYQRPGY YSAPQTPLSP TPMFFPLEPS APSKLHSVTG IDTKDKSLKT |
| 181 | VSSGAKKSFE LLSESDGALM EHPEVSQVRR KTVEFNLTDM PEIPENHLKE PLEQSPTNIH |
| 241 | TTLKDHMDPY WALENRSVLH LNQGHCIALC PTPASLALSL PFLHNFLGFH HCQSTLDLRP |
| 301 | ALAWGIYLAT FTGILGKCSG PFLTSPWYHP EDFLGPGEGR |

SEQ ID NO: 185
BESTROPHIN 1 (BEST1), ISOFORM 8
ALQ33852.1

| | |
|---|---|
| 1 | MFEKLTLYCD SYIQLIPISF VLGDEHLAYS VWTPVCLRLD |

SEQ ID NO: 186
COMPLEMENT FACTOR B
AAA16820.1

| | |
|---|---|
| 1 | MGSNLSPQLC LMPFILGLLS GGVTTTPWSL AQPQGSCSLE GVEIKGGSFR LLQEGQALEY |
| 61 | VCPSGFYPYP VQTRTCRSTG SWSTLKTQDQ KTVRKAECRA IHCPRPHDFE NGEYWPRSPY |
| 121 | YNVSDEISFH CYDGYTLRGS ANRTCQVNGR WSGQTAICDN GAGYCSNPGI PIGTRKVGSQ |
| 181 | YRLEDSVTYH CSRGLTLRGS QRRTCQEGGS WSGTEPSCQD SFMYDTPQEV AEAFLSSLTE |
| 241 | TIEGVDAEDG HGPGEQQKRK IVLDPSGSMN IYLVLDGSDS IGASNFTGAK KCLVNLIEKV |
| 301 | ASYGVKPRYG LVTYATYPKI WVKVSEADSS NADWVTKQLN EINYEDHKLK SGTNTKKALQ |
| 361 | AVYSMMSWPD DVPPEGWNRT RHVIILMTDG LHNMGGDPIT VIDEIRDLLY IGKDRKNPRE |
| 421 | DYLDVYVFGV GPLVNQVNIN ALASKKDNEQ HVFKVKDMEN LEDVFYQMID ESQSLSLCGM |
| 481 | VWEHRKGTDY HKQPWQAKIS VIRPSKGHES CMGAVVSEYF VLTAAHCFTV DDKEHSIKVS |
| 541 | VGGEKRDLEI EVVLFHPNYN INGKKEAGIP EFYDYDVALI KLKNKLKYGQ TIRPICLPCT |
| 601 | EGTTRALRLP PTTTCQQQKE ELLPAQDIKA LFVSEEEKKL TRKEVYIKNG DKKGSCERDA |
| 661 | QYAPGYDKVK DISEVVTPRF LCTGGVSPYA DPNTCRGDSG GPLIVHKRSR FIQVGVISWG |
| 721 | VVDVCKNQKR QKQVPAHARD FHINLFQVLP WLKEKLQDED LGFL |

SEQ ID NO: 187
BETA-AMYLOID, PARTIAL
AAB29908.1

| | |
|---|---|
| 1 | DAEFRHDSGY EVHHQKLVFF AEDVGSNKGA |

SEQ ID NO: 188
BETA-AMYLOID, PARTIAL
AAB26264.2

| | |
|---|---|
| 1 | GSGLTNIKTE EISEVKMDAE FRHDSGYEVH HQKLVFFAED VGSNKGAIIG LMVGGVVIAT |
| 61 | VIIITLVMLK KQYTSNHHGV VE |

SEQ ID NO: 189
CD59 GLYCOPROTEIN (CD59)
NP_001120697.1

| | |
|---|---|
| 1 | MGIQGGSVLF GLLLVLAVFC HSGHSLQCYN CPNPTADCKT AVNCSSDFDA CLITKAGLQV |
| 61 | YNKCWKFEHC NFNDVTTRLR ENELTYYCCK KDLCNFNEQL ENGGTSLSEK TVLLLVTPFL |
| 121 | AAAWSLHP |

SEQ ID NO: 190
CHANNELRHODOPSIN-1 (CHR1) [VOLVOX CARTERI F. NAGARIENSIS]
ABZ90901.1

| | |
|---|---|
| 1 | MDYPVARSLI VRYPTDLGNG TVCMPRGQCY CEGWLRSRGT SIEKTIAITL QWVVFALSVA |
| 61 | CLGWYAYQAW RATCGWEEVY VALIEMMKSI IEAFHEFDSP ATLWLSSGNG VVWMRYGEWL |
| 121 | LTCPVLLIHL SNLTGLKDDY SKRTMGLLVS DVGCIVWGAT SAMCIGWTKI LFFLISLSYG |
| 181 | MYTYFHAAKV YIEAFHTVPK GICRELVRVM AWTFFVAWGM FPVLFLLGTE GFGHISPYGS |
| 241 | AIGHSILDLI AKNMWGVLGN YLRVKIHEHI LLYGDIRKKQ KITIAGQEME VETLVAEEED |
| 301 | DTVKQSTAKY ASRDSFITMR NRMREKGLEV RASLDAGGGD SGMEAGGGGA AHAQPHMAKP |
| 361 | GTELGKTMSA SFTNGAATSL EPGRVILAVP DISMVDFFRE QFAQLPVPYE VVPALGAENT |
| 421 | VQLVQQAAML GGCDFVLMHP EFLRDRGPTG LLPQVKMMGQ RTAAFGWSQM GPMRDLIESS |
| 481 | GVGAWLEGPS FGSGISQAAL QQLVVKMQQA KRMAAMGSMM GGGMGNGMGM GMGMGMGMGM |
| 541 | GNGMGNGMGM GNGMGNGMGM GNGMGNGMGM GNGMGMGNGM GMGNGMGMGN GMGNGMGNGM |
| 601 | GMGNGMGNGM GNGMGNGMGN GMGNGMGMGN GMGMGNGMGN GMGNGMGNGM GNGMGMMTPG |
| 661 | AMGMGMGGMG NLAAAAGNAM YGGGGGGGGS TMGSGNAAMM TGLVMGGGNG VGAGPGGVVA |
| 721 | NLGSSALQPQ SQMMGGGNVV GMSSPQLQLQ QSSSMPLGGL APNRIGNNPL FGAAPSPLHS |
| 781 | QPGASPTGLS SPQLGMGAML PAGTSVGAGG GSVGPTETDM LQQLMTEINR LKDELGE |

SEQ ID NO: 191
CHANNELRHODOPSIN-2 (CHR2) [VOLVOX CARTERI F. NAGARIENSIS]
ABZ90903.1

| | |
|---|---|
| 1 | MDHPVARSLI GSSYTNLNNG SIVIPSDACF CMKWLKSKGS PVALKMANAL QWAAFALSVI |
| 61 | ILIYYAYATW RTTCGWEEVY VCCVELTKVV IEFFHEFDEP GMLYLANGNR VLWLRYGEWL |
| 121 | LTCPVILIHL SNLTGLKDDY NKRTMRLLVS DVGTIVWGAT AAMSTGYIKV IFFLLGCMYG |
| 181 | ANTFFHAAKV YIESYHTVPK GLCRQLVRAM AWLFFVSWGM FPVLFLLGPE GFGHLSVYGS |
| 241 | TIGHTIIDLL SKNCWGLLGH FLRLKIHEHI LLYGDIRKVQ KIRVAGEELE VETLMTEEAP |
| 301 | DTVKKSTAQY ANRESFLTMR DKLKEKGFEV RASLDNSGID AVINHNNNYN NALANAAAAV |
| 361 | GKPGMELSKL DHVAANAAGM GGIADHVATT SGAISPGRVI LAVPDISMVD YFREQFAQLP |
| 421 | VQYEVVPALG ADNAVQLVVQ AAGLGGCDFV LLHPEFLRDK SSTSLPARLR SIGQRVAAFG |
| 481 | WSPVGPVRDL IESAGLDGWL EGPSFGLGIS LPNLASLVLR MQHARKMAAM LGGMGGMLGS |
| 541 | NLMSGSGGVG LMGAGSPGGG GGAMGVGMTG MGMVGTNAMG RGAVGNSVAN ASMGGGSAGM |
| 601 | GMGMMGMVGA GVGGQQQMGA NGMGPTSFQL GSNPLYNTAP SPLSSQPGGD ASAAAAAAAA |
| 661 | AAATGAASNS MNAMQAGGSV RNSGILAGGL GSMMGPPGAP AAPTAAATAA PAVTMGAPGG |
| 721 | GGAAASEAEM LQQLMAEINR LKSELGE |

SEQ ID NO: 192
COMPLEMENT FACTOR C5, ISOFORM 1
NP_001726.2

| | |
|---|---|
| 1 | MGLLGILCFL IFLGKTWGQE QTYVISAPKI FRVGASENIV IQVYGYTEAF DATISIKSYP |
| 61 | DKKFSYSSGH VHLSSENKFQ NSAILTIQPK QLPGGQNPVS YVYLEVVSKH FSKSKRMPIT |
| 121 | YDNGFLFIHT DKPVYTPDQS VKVRVYSLND DLKPAKRETV LTFIDPEGSE VDMVEEIDHI |
| 181 | GIISFPDFKI PSNPRYGMWT IKAKYKEDFS TTGTAYFEVK EYVLPHFSVS IEPEYNFIGY |
| 241 | KNFKNFEITI KARYFYNKVV TEADVYITFG IREDLKDDQK EMMQTAMQNT MLINGIAQVT |
| 301 | FDSETAVKEL SYYSLEDLNN KYLYIAVTVI ESTGGFSEEA EIPGIKYVLS PYKLNLVATP |
| 361 | LFLKPGIPYP IKVQVKDSLD QLVGGVPVTL NAQTIDVNQE TSDLDPSKSV TRVDDGVASF |
| 421 | VLNLPSGVTV LEFNVKTDAP DLPEENQARE GYRAIAYSSL SQSYLYIDWT DNHKALLVGE |
| 481 | HLNIIVTPKS PYIDKITHYN YLILSKGKII HFGTREKFSD ASYQSINIPV TQNMVPSSRL |
| 541 | LVYYIVTGEQ TAELVSDSVW LNIEEKCGNQ LQVHLSPDAD AYSPGQTVSL NMATGMDSWV |
| 601 | ALAAVDSAVY GVQRGAKKPL ERVFQFLEKS DLGCGAGGGL NNANVFHLAG LTFLTNANAD |
| 661 | DSQENDEPCK EILRPRRTLQ KKIEEIAAKY KHSVVKKCCY DGACVNNDET CEQRAARISL |
| 721 | GPRCIKAFTE CCVVASQLRA NISHKDMQLG RLHMKTLLPV SKPEIRSYFP ESWLWEVHLV |
| 781 | PRRKQLQFAL PDSLTTWEIQ GVGISNTGIC VADTVKAKVF KDVFLEMNIP YSVVRGEQIQ |
| 841 | LKGTVYNYRT SGMQFCVKMS AVEGICTSES PVIDHQGTKS SKCVRQKVEG SSSHLVTFTV |
| 901 | LPLEIGLHNI NFSLETWFGK EILVKTLRVV PEGVKRESYS GVTLDPRGIY GTISRRKEFP |
| 961 | YRIPLDLVPK TEIKRILSVK GLLVGEILSA VLSQEGINIL THLPKGSAEA ELMSVVPVFY |
| 1021 | VFHYLETGNH WNIFHSDPLI EKQKLKKKLK EGMLSIMSYR NADYSYSVWK GGSASTWLTA |
| 1081 | FALRVLGQVN KYVEQNQNSI CNSLLWLVEN YQLDNGSFKE NSQYQPIKLQ GTLPVEAREN |
| 1141 | SLYLTAFTVI GIRKAFDICP LVKIDTALIK ADNFLLENTL PAQSTFTLAI SAYALSLGDK |
| 1201 | THPQFRSIVS ALKREALVKG NPPIYRFWKD NLQHKDSSVP NTGTARMVET TAYALLTSLN |
| 1261 | LKDINYVNPV IKWLSEEQRY GGGFYSTQDT INAIEGLTEY SLLVKQLRLS MDIDVSYKHK |
| 1321 | GALHNYKMTD KNFLGRPVEV LLNDDLIVST GFGSGLATVH VTTVVHKTST SEEVCSFYLK |
| 1381 | IDTQDIEASH YRGYGNSDYK RIVACASYKP SREESSSGSS HAVMDISLPT GISANEEDLK |
| 1441 | ALVEGVDQLF TDYQIKDGHV ILQLNSIPSS DFLCVRFRIF ELFEVGFLSP ATFTVYEYHR |
| 1501 | PDKQCTMFYS TSNIKIQKVC EGAACKCVEA DCGQMQEELD LTISAETRKQ TACKPEIAYA |
| 1561 | YKVSITSITV ENVFVKYKAT LLDIYKTGEA VAEKDSEITF IKKVICTNAE LVKGRQYLIM |
| 1621 | GKEALQIKYN FSFRYIYPLD SLTWIEYWPR DTTCSSCQAF LANLDEFAED IFLNGC |

SEQ ID NO: 193
COMPLEMENT FACTOR C5, ISOFORM 2
NP_001304092.1

| | |
|---|---|
| 1 | MPGSLGREAS GRAGPTGCGA FAFGLRCRYV ISAPKIFRVG ASENIVIQVY GYTEAFDATI |
| 61 | SIKSYPDKKF SYSSGHVHLS SENKFQNSAI LTIQPKQLPG GQNPVSYVYL EVVSKHFSKS |
| 121 | KRMPITYDNG FLFIHTDKPV YTPDQSVKVR VYSLNDDLKP AKRETVLTFI DPEGSEVDMV |
| 181 | EEIDHIGIIS FPDFKIPSNP RYGMWTIKAK YKEDFSTTGT AYFEVKEYVL PHFSVSIEPE |
| 241 | YNFIGYKNFK NFEITIKARY FYNKVVTEAD VYITFGIRED LKDDQKEMMQ TAMQNTMLIN |
| 301 | GIAQVTFDSE TAVKELSYYS LEDLNNKYLY IAVIVIESTG GFSEEAEIPG IKYVLSPYKL |
| 361 | NLVATPLFLK PGIPYPIKVQ VKDSLDQLVG GVPVTLNAQT IDVNQETSDL DPSKSVTRVD |
| 421 | DGVASFVLNL PSGVTVLEFN VKTDAPDLPE ENQAREGYRA IAYSSLSQSY LYIDWTDNHK |
| 481 | ALLVGEHLNI IVTPKSPYID KITHYNYLIL SKGKIIHFGT REKFSDASYQ SINIPVTQNM |
| 541 | VPSSRLLVYY IVTGEQTAEL VSDSVWLNIE EKCGNQLQVH LSPDADAYSP GQTVSLNMAT |
| 601 | GMDSWVALAA VDSAVYGVQR GAKKPLERVF QFLEKSDLGC GAGGGLNNAN VFHLAGLTFL |
| 661 | TNANADDSQE NDEPCKEILR PRRTLQKKIE EIAAKYKHSV VKKCCYDGAC VNNDETCEQR |
| 721 | AARISLGPRC IKAFTECCVV ASQLRANISH KDMQLGRLHM KTLLPVSKPE IRSYFPESWL |
| 781 | WEVHLVPRRK QLQFALPDSL TTWEIQGVGI SNTGICVADT VKAKVFKDVF LEMNIPYSVV |
| 841 | RGEQIQLKGT VYNYRTSGMQ FCVKMSAVEG ICTSESPVID HQGTKSSKCV RQKVEGSSSH |
| 901 | LVTFTVLPLE IGLHNINFSL ETWFGKEILV KTLRVVPEGV KRESYSGVTL DPRGIYGTIS |
| 961 | RRKEFPYRIP LDLVPKTEIK RILSVKGLLV GEILSAVLSQ EGINILTHLP KGSAEAELMS |
| 1021 | VVPVFYVFHY LETGNHWNIF HSDPLIEKQK LKKKLKEGML SIMSYRNADY SYSVWKGGSA |
| 1081 | STWLTAFALR VLGQVNKYVE QNQNSICNSL LWLVENYQLD NGSFKENSQY QPIKLQGTLP |
| 1141 | VEARENSLYL TAFTVIGIRK AFDICPLVKI DTALIKADNF LLENTLPAQS TFTLAISAYA |
| 1201 | LSLGDKTHPQ FRSIVSALKR EALVKGNPPI YRFWKDNLQH KDSSVPNTGT ARMVETTAYA |
| 1261 | LLTSLNLKDI NYVNPVIKWL SEEQRYGGGF YSTQDTINAI EGLTEYSLLV KQLRLSMDID |
| 1321 | VSYKHKGALH NYKMTDKNFL GRPVEVLLND DLIVSTGFGS GLATVHVTTV VHKTSTSEEV |
| 1381 | CSFYLKIDTQ DIEASHYRGY GNSDYKRIVA CASYKPSREE SSSGSSHAVM DISLPTGISA |
| 1441 | NEEDLKALVE GVDQLFTDYQ IKDGHVILQL NSIPSSDFLC VRFRIFELFE VGFLSPATFT |
| 1501 | VYEYHRPDKQ CTMFYSTSNI KIQKVCEGAA CKCVEADCGQ MQEELDLTIS AETRKQTACK |
| 1561 | PEIAYAYKVS ITSITVENVF VKYKATLLDI YKTGEAVAEK DSEITFIKKV TCTNAELVKG |
| 1621 | RQYLIMGKEA LQIKYNFSFR YIYPLDSLTW IEYWPRDTTC SSCQAFLANL DEFAEDIFLN |
| 1681 | GC |

SEQ ID NO: 194
COMPLEMENT FACTOR C5, ISOFORM 2
NP_001304093.1

| | |
|---|---|
| 1 | MGLLGILCFL IFLGKTWGQE QTYVISAPKI FRVGASENIV IQVYGYTEAF DATISIKSYP |
| 61 | DKKFSYSSGH VHLSSENKFQ NSAILTIQPK QLPGGQNPVS YVYLEVVSKH FSKSKRMPIT |
| 121 | YDNGFLFIHT DKPVYTPDQS VKVRVYSLND DLKPAKRETV LTFIDPEGSE VDMVEEIDHI |
| 181 | GIISFPDFKI PSNPRYGMWT IKAKYKEDFS TTGTAYFEVK EYVLPHFSVS IEPEYNFIGY |
| 241 | KNFKNFEITI KARYFYNKVV TEADVYITFG IREDLKDDQK EMMQTAMQNT MLINGIAQVT |
| 301 | FDSETAVKEL SYYSLEDLNN KYLYIAVTVI ESTGGFSEEA EIPGIKYVLS PYKLNLVATP |
| 361 | LFLKPGIPYP IKVQVKDSLD QLVGGVPVTL NAQTIDVNQE TSDLDPSKSV TRVDDGVASF |
| 421 | VLNLPSGVTV LEFNVKTDAP DLPEENQARE GYRAIAYSSL SQSYLYIDWT DNHKALLVGE |
| 481 | HLNIIVTPKS PYIDKITHYN YLILSKGKII HFGTREKFSD ASYQSINIPV TQNMVPSSRL |
| 541 | LVYYIVTGEQ TAELVSDSVW LNIEEKCGNQ LQVHLSPDAD AYSPGQTVSL NMATGMDSWV |
| 601 | ALAAVDSAVY GVQRGAKKPL ERVFQFLEKS DLGCGAGGGL NNANVFHLAG LTFLTNANAD |
| 661 | DSQENDEPCK EILRPRRTLQ KKIEEIAAKY KHSVVKKCCY DGACVNNDET CEQRAARISL |
| 721 | GPRCIKAFTE CCVVASQLRA NISHKDMQLG RLHMKTLLPV SKPEIRSYFP ESWLWEVHLV |
| 781 | PRRKQLQFAL PDSLTTWEIQ GVGISNTGIC VADTVKAKVF KDVFLEMNIP YSVVRGEQIQ |
| 841 | LKGTVYNYRT SGMQSLALSP RLECNGKISG HCKLRLPGSS DSPASASQVA GITGTHHHAQ |
| 901 | PT |

SEQ ID NO: 195
COMPLEMENT FACTOR CSA
3PVM_A

| | |
|---|---|
| 1 | MGLLGILCFL IFLGKTWGQE QTYVISAPKI FRVGASENIV IQVYGYTEAF DATISIKSYP |
| 61 | DKKFSYSSGH VHLSSENKFQ NSAILTIQPK QLPGGQNPVS YVYLEVVSKH FSKSKRMPIT |
| 121 | YDNGFLFIHT DKPVYTPDQS VKVRVYSLND DLKPAKRETV LTFIDPEGSE VDMVEEIDHI |
| 181 | GIISFPDFKI PSNPRYGMWT IKAKYKEDFS TTGTAYFEVK EYVLPHFSVS IEPEYNFIGY |
| 241 | KNFKNFEITI KARYFYNKVV TEADVYITFG IREDLKDDQK EMMQTAMQNT MLINGIAQVT |
| 301 | FDSETAVKEL SYYSLEDLNN KYLYIAVTVI ESTGGFSEEA EIPGIKYVLS PYKLNLVATP |
| 361 | LFLKPGIPYP IKVQVKDSLD QLVGGVPVTL NAQTIDVNQE TSDLDPSKSV TRVDDGVASF |
| 421 | VLNLPSGVTV LEFNVKTDAP DLPEENQARE GYRAIAYSSL SQSYLYIDWT DNHKALLVGE |
| 481 | HLNIIVTPKS PYIDKITHYN YLILSKGKII HFGTREKFSD ASYQSINIPV TQNMVPSSRL |
| 541 | LVYYIVTGEQ TAELVSDSVW LNIEEKCGNQ LQVHLSPDAD AYSPGQTVSL NMATGMDSWV |
| 601 | ALAAVDSAVY GVQRGAKKPL ERVFQFLEKS DLGCGAGGGL NNANVFHLAG LTFLTNANAD |
| 661 | DSQENDEPCK EILRPRRTLQ KKIEEIAAKY KHSVVKKCCY DGACVNNDET CEQRAARISL |
| 721 | GPRCIKAFTE CCVVASQLRA NISHKDMQLG RLHMKTLLPV SKPEIRSYFP ESWLWEVHLV |
| 781 | PRRKQLQFAL PDSLTTWEIQ GVGISNTGIC VADTVKAKVF KDVFLEMNIP YSVVRGEQIQ |
| 841 | LKGTVYNYRT SGMQFCVKMS AVEGICTSES PVIDHQGTKS SKCVRQKVEG SSSHLVTFTV |
| 901 | LPLEIGLHNI NFSLETWFGK EILVKTLRVV PEGVKRESYS GVTLDPRGIY GTISRRKEFP |
| 961 | YRIPLDLVPK TEIKRILSVK GLLVGEILSA VLSQEGINIL THLPKGSAEA ELMSVVPVFY |
| 1021 | VFHYLETGNH WNIFHSDPLI EKQKLKKKLK EGMLSIMSYR NADYSYSVWK GGSASTWLTA |
| 1081 | FALRVLGQVN KYVEQNQNSI CNSLLWLVEN YQLDNGSFKE NSQYQPIKLQ GTLPVEAREN |
| 1141 | SLYLTAFTVI GIRKAFDICP LVKIDTALIK ADNFLLENTL PAQSTFTLAI SAYALSLGDK |
| 1201 | THPQFRSIVS ALKREALVKG NPPIYRFWKD NLQHKDSSVP NTGTARMVET TAYALLTSLN |
| 1261 | LKDINYVNPV IKWLSEEQRY GGGFYSTQDT INAIEGLTEY SLLVKQLRLS MDIDVSYKHK |
| 1321 | GALHNYKMTD KNFLGRPVEV LLNDDLIVST GFGSGLATVH VTTVVHKTST SEEVCSFYLK |
| 1381 | IDTQDIEASH YRGYGNSDYK RIVACASYKP SREESSSGSS HAVMDISLPT GISANEEDLK |
| 1441 | ALVEGVDQLF TDYQIKDGHV ILQLNSIPSS DFLCVRFRIF ELFEVGFLSP ATFTVYEYHR |
| 1501 | PDKQCTMFYS TSNIKIQKVC EGAACKCVEA DCGQMQEELD LTISAETRKQ TACKPEIAYA |
| 1561 | YKVSITSITV ENVFVKYKAT LLDIYKTGEA VAEKDSEITF IKKVICTNAE LVKGRQYLIM |
| 1621 | GKEALQIKYN FSFRYIYPLD SLTWIEYWPR DTTCSSCQAF LANLDEFAED IFLNGC |

SEQ ID NO: 196
COMPLEMENT FACTOR D, ISOFORM 1
NP_001919.2

| | |
|---|---|
| 1 | MHSWERLAVL VLLGAAACAA PPRGRILGGR EAEAHARPYM ASVQLNGAHL CGGVLVAEQW |
| 61 | VLSAAHCLED AADGKVQVLL GAHSLSQPEP SKRLYDVLRA VPHPDSQPDT IDHDLLLLQL |
| 121 | SEKATLGPAV RPLPWQRVDR DVAPGTLCDV AGWGIVNHAG RRPDSLQHVL LPVLDRATCN |
| 181 | RRTHHDGAIT ERLMCAESNR RDSCKGDSGG PLVCGGVLEG VVTSGSRVCG NRKKPGIYTR |
| 241 | VASYAAWIDS VLA |

SEQ ID NO: 197
COMPLEMENT FACTOR D, ISOFORM 2
NP_001304264.1

| | |
|---|---|
| 1 | MHSWERLAVL VLLGAAACGE EAWAWAAPPR GRILGGREAE AHARPYMASV QLNGAHLCGG |
| 61 | VLVAEQWVLS AAHCLEDAAD GKVQVLLGAH SLSQPEPSKR LYDVLRAVPH PDSQPDTIDH |
| 121 | DLLLLQLSEK ATLGPAVRPL PWQRVDRDVA PGTLCDVAGW GIVNHAGRRP DSLQHVLLPV |
| 181 | LDRATCNRRT HHDGAITERL MCAESNRRDS CKGDSGGPLV CGGVLEGVVT SGSRVCGNRK |
| 241 | KPGIYTRVAS YAAWIDSVLA |

SEQ ID NO: 198
DNAJ HEAT SHOCK PROTEIN FAMILY (HSP40) MEMBER C3 (DNAJC3), ALSO KNOWN AS
P58IPK
NP_006251.1

| | |
|---|---|
| 1 | MVAPGSVTSR LGSVFPFLLV LVDLQYEGAE CGVNADVEKH LELGKKLLAA GQLADALSQF |
| 61 | HAAVDGDPDN YIAYYRRATV FLAMGKSKAA LPDLTKVIQL KMDFTAARLQ RGHLLLKQGK |
| 121 | LDEAEDDFKK VLKSNPSENE EKEAQSQLIK SDEMQRLRSQ ALNAFGSGDY TAAIAFLDKI |
| 181 | LEVCVWDAEL RELRAECFIK EGEPRKAISD LKAASKLKND NTEAFYKIST LYYQLGDHEL |
| 241 | SLSEVRECLK LDQDHKRCFA HYKQVKKLNK LIESAEELIR DGRYTDATSK YESVMKTEPS |
| 301 | IAEYTVRSKE RICHCFSKDE KPVEAIRVCS EVLQMEPDNV NALKDRAEAY LIEEMYDEAI |
| 361 | QDYETAQEHN ENDQQIREGL EKAQRLLKQS QKRDYYKILG VKRNAKKQEI IKAYRKLALQ |
| 421 | WHPDNFQNEE EKKKAEKKFI DIAAAKEVLS DPEMRKKFDD GEDPLDAESQ QGGGGNPFHR |
| 481 | SWNSWQGFNP FSSGGPFRFK FHFN |

SEQ ID NO: 199
DNAJ HEAT SHOCK PROTEIN FAMILY (HSP40) MEMBER C3 (DNAJC3), ALSO KNOWN AS
P58IPK, ISOFORM X1
XP_011519406.1

| | |
|---|---|
| 1 | MVAPGSVTSR LGSVFPFLLV LVDLQYEGAE CGVNADVEKH LELGKKLLAA GQLADALSQF |
| 61 | HAAVDGDPDN YIAYYRRATV FLAMGKSKAA LPDLTKVIQL KMDFTAARLQ RGHLLLKQGK |
| 121 | LDEAEDDFKK VVFPVPSLLG LQRSLLDDLY LLFWFFLMKK LKSNPSENEE KEAQSQLIKS |
| 181 | DEMQRLRSQA LNAFGSGDYT AAIAFLDKIL EVCVWDAELR ELRAECFIKE GEPRKAISDL |
| 241 | KAASKLKNDN TEAFYKISTL YYQLGDHELS LSEVRECLKL DQDHKRCFAH YKQVKKLNKL |
| 301 | IESAEELIRD GRYTDATSKY ESVMKTEPSI AEYTVRSKER ICHCFSKDEK PVEAIRVCSE |
| 361 | VLQMEPDNVN ALKDRAEAYL IEEMYDEAIQ DYETAQEHNE NDQQIREGLE KAQRLLKQSQ |
| 421 | KRDYYKILGV KRNAKKQEII KAYRKLALQW HPDNFQNEEE KKKAEKKFID IAAAKEVLSD |
| 481 | PEMRKKFDDG EDPLDAESQQ GGGGNPFHRS WNSWQGFNPF SSGGPFRFKF HFN |

SEQ ID NO: 200
DNAJ HEAT SHOCK PROTEIN FAMILY (HSP40) MEMBER C3 (DNAJC3), ALSO KNOWN AS
P58IPK, ISOFORM X2
XP_011519407.1

| | |
|---|---|
| 1 | MGKSKAALPD LTKVIQLKMD FTAARLQRGH LLLKQGKLDE AEDDFKKVVF PVPSLLGLQR |
| 61 | SLLDDLYLLF WFFLMKKLKS NPSENEEKEA QSQLIKSDEM QRLRSQALNA FGSGDYTAAI |
| 121 | AFLDKILEVC VWDAELRELR AECFIKEGEP RKAISDLKAA SKLKNDNTEA FYKISTLYYQ |
| 181 | LGDHELSLSE VRECLKLDQD HKRCFAHYKQ VKKLNKLIES AEELIRDGRY TDATSKYESV |
| 241 | MKTEPSIAEY TVRSKERICH CFSKDEKPVE AIRVCSEVLQ MEPDNVNALK DRAEAYLIEE |
| 301 | MYDEAIQDYE TAQEHNENDQ QIREGLEKAQ RLLKQSQKRD YYKILGVKRN AKKQEIIKAY |
| 361 | RKLALQWHPD NFQNEEEKKK AEKKFIDIAA AKEVLSDPEM RKKFDDGEDP LDAESQQGGG |
| 421 | GNPFHRSWNS WQGFNPFSSG GPFRFKFHFN |

SEQ ID NO: 201
DNAJ HEAT SHOCK PROTEIN FAMILY (HSP40) MEMBER C3 (DNAJC3), ALSO KNOWN AS
P58IPK, ISOFORM X3
XP_016876163.1

| | |
|---|---|
| 1 | MGKSKAALPD LTKVIQLKMD FTAARLQRGH LLLKQGKLDE AEDDFKKVLK SNPSENEEKE |
| 61 | AQSQLIKSDE MQRLRSQALN AFGSGDYTAA IAFLDKILEV CVWDAELREL RAECFIKEGE |
| 121 | PRKAISDLKA ASKLKNDNTE AFYKISTLYY QLGDHELSLS EVRECLKLDQ DHKRCFAHYK |
| 181 | QVKKLNKLIE SAEELIRDGR YTDATSKYES VMKTEPSIAE YTVRSKERIC HCFSKDEKPV |
| 241 | EAIRVCSEVL QMEPDNVNAL KDRAEAYLIE EMYDEAIQDY ETAQEHNEND QQIREGLEKA |
| 301 | QRLLKQSQKR DYYKILGVKR NAKKQEIIKA YRKLALQWHP DNFQNEEEKK KAEKKFIDIA |
| 361 | AAKEVLSDPE MRKKFDDGED PLDAESQQGG GGNPFHRSWN SWQGFNPFSS GGPFRFKFHF |
| 421 | N |

SEQ ID NO: 202
DNAJ HEAT SHOCK PROTEIN FAMILY (HSP40) MEMBER C3 (DNAJC3), ALSO KNOWN AS
P58IPK, ISOFORM X4
XP_016876164.1

| | |
|---|---|
| 1 | MCFLHFFKKV LKSNPSENEE KEAQSQLIKS DEMQRLRSQA LNAFGSGDYT AAIAFLDKIL |
| 61 | EVCVWDAELR ELRAECFIKE GEPRKAISDL KAASKLKNDN TEAFYKISTL YYQLGDHELS |
| 121 | LSEVRECLKL DQDHKRCFAH YKQVKKLNKL IESAEELIRD GRYTDATSKY ESVMKTEPSI |
| 181 | AEYTVRSKER ICHCFSKDEK PVEAIRVCSE VLQMEPDNVN ALKDRAEAYL IEEMYDEAIQ |
| 241 | DYETAQEHNE NDQQIREGLE KAQRLLKQSQ KRDYYKILGV KRNAKKQEII KAYRKLALQW |
| 301 | HPDNFQNEEE KKKAEKKFID IAAAKEVLSD PEMRKKFDDG EDPLDAESQQ GGGGNPFHRS |
| 361 | WNSWQGFNPF SSGGPFRFKF HFN |

SEQ ID NO: 203
BETA-2 ADRENOCEPTOR
NP_000015.1

| | |
|---|---|
| 1 | MGQPGNGSAF LLAPNRSHAP DHDVTQQRDE VWVVGMGIVM SLIVLAIVFG NVLVITAIAK |
| 61 | FERLQTVTNY FITSLACADL VMGLAVVPFG AAHILMKMWT FGNFWCEFWT SIDVLCVTAS |
| 121 | IETLCVIAVD RYFAITSPFK YQSLLTKNKA RVIILMVWIV SGLTSFLPIQ MHWYRATHQE |
| 181 | AINCYANETC CDFFTNQAYA IASSIVSFYV PLVIMVFVYS RVFQEAKRQL QKIDKSEGRF |
| 241 | HVQNLSQVEQ DGRTGHGLRR SSKFCLKEHK ALKTLGIIMG TFTLCWLPFF IVNIVHVIQD |
| 301 | NLIRKEVYIL LNWIGYVNSG FNPLIYCRSP DFRIAFQELL CLRRSSLKAY GNGYSSNGNT |
| 361 | GEQSGYHVEQ EKENKLLCED LPGTEDFVGH QGTVPSDNID SQGRNCSTND SLL |

SEQ ID NO: 204
CASPASE-2 (CASP2)
AAX36439.1

| | |
|---|---|
| 61 | PKRGPQAFDA FCEALRETKQ GHLEDMLLTT LSGLQHVLPP LSCDYDLSLP FPVCESCPLY |
| 121 | KKLRLSTDTV EHSLDNKDGP VCLQVKPCTP EFYQTHFQLA YRLQSRPRGL ALVLSNVHFT |
| 181 | GEKELEFRSG GDVDHSTLVT LFKLLGYDVH VLCDQTAQEM QEKLQNFAQL PAHRVTDSCI |
| 241 | VALLSHGVEG AIYGVDGKLL QLQEVFQLFD NANCPSLQNK PKMFFIQACR GGAIGSLGHL |
| 301 | LLFTAATASL AL |

SEQ ID NO: 205
INSULIN RECEPTOR SUBSTRATE 1 (IRS1)
NP_005535.1

| | |
|---|---|
| 1 | MASPPESDGF SDVRKVGYLR KPKSMHKRFF VLRAASEAGG PARLEYYENE KKWRHKSSAP |
| 61 | KRSIPLESCF NINKRADSKN KHLVALYTRD EHFAIAADSE AEQDSWYQAL LQLHNRAKGH |
| 121 | HDGAAALGAG GGGGSCSGSS GLGEAGEDLS YGDVPPGPAF KEVWQVILKP KGLGQTKNLI |
| 181 | GIYRLCLTSK TISFVKLNSE AAAVVLQLMN IRRCGHSENF FFIEVGRSAV TGPGEFWMQV |
| 241 | DDSVVAQNMH ETILEAMRAM SDEFRPRSKS QSSSNCSNPI SVPLRRHHLN NPPPSQVGLT |
| 301 | RRSRTESITA TSPASMVGGK PGSFRVRASS DGEGTMSRPA SVDGSPVSPS TNRTHAHRHR |
| 361 | GSARLHPPLN HSRSIPMPAS RCSPSATSPV SLSSSSTSGH GSTSDCLFPR RSSASVSGSP |
| 421 | SDGGFISSDE YGSSPCDFRS SFRSVTPDSL GHTPPARGEE ELSNYICMGG KGPSTLTAPN |
| 481 | GHYILSRGGN GHRCTPGTGL GTSPALAGDE AASAADLDNR FRKRTHSAGT SPTITHQKTP |
| 541 | SQSSVASIEE YTEMMPAYPP GGGSGGRLPG HRHSAFVPTR SYPEEGLEMH PLERRGGHHR |
| 601 | PDSSTLHTDD GYMPMSPGVA PVPSGRKGSG DYMPMSPKSV SAPQQIINPI RRHPQRVDPN |
| 661 | GYMMMSPSGG CSPDIGGGPS SSSSSSNAVP SGTSYGKLWT NGVGGHHSHV LPHPKPPVES |
| 721 | SGGKLLPCTG DYMNMSPVGD SNTSSPSDCY YGPEDPQHKP VLSYYSLPRS FKHTQRPGEP |
| 781 | EEGARHQHLR LSTSSGRLLY AATADDSSSS TSSDSLGGGY CGARLEPSLP HPHHQVLQPH |
| 841 | LPRKVDTAAQ TNSRLARPTR LSLGDPKAST LPRAREQQQQ QQPLLHPPEP KSPGEYVNIE |
| 901 | FGSDQSGYLS GPVAFHSSPS VRCPSQLQPA PREEETGTEE YMKMDLGPGR RAAWQESTGV |
| 961 | EMGRLGPAPP GAASICRPTR AVPSSRGDYM TMQMSCPRQS YVDTSPAAPV SYADMRTGIA |
| 1021 | AEEVSLPRAT MAAASSSSAA SASPTGPQGA AELAAHSSLL GGPQGPGGMS AFTRVNLSPN |
| 1081 | RNQSAKVIRA DPQGCRRRHS SETFSSTPSA TRVGNTVPFG AGAAVGGGGG SSSSSEDVKR |
| 1141 | HSSASFENVW LRPGELGGAP KEPAKLCGAA GGLENGLNYI DLDLVKDFKQ CPQECTPEPQ |
| 1201 | PPPPPPPHQP LGSGESSSTR RSSEDLSAYA SISFQKQPED RQ |

SEQ ID NO: 206
HIF-1 RESPONSIVE PROTEIN RTP801 (RTP801)
Q9NX09.1

| | |
|---|---|
| 1 | MPSLWDRFSS SSTSSSPSSL PRTPTPDRPP RSAWGSATRE EGFDRSTSLE SSDCESLDSS |
| 61 | NSGFGPEEDT AYLDGVSLPD FELLSDPEDE HLCANLMQLL QESLAQARLG SRRPARLLMP |
| 121 | SQLVSQVGKE LLRLAYSEPC GLRGALLDVC VEQGKSCHSV GQLALDPSLV PTFQLTLVLR |
| 181 | LDSRLWPKIQ GLFSSANSPF LPGFSQSLTL STGFRVIKKK LYSSEQLLIE EC |

SEQ ID NO: 207
TRANSFORMING GROWTH FACTOR BETA 2 (TGFB2)
AAH99635.1

| | |
|---|---|
| 1 | MHYCVLSAFL ILHLVTVALS LSTCSTLDMD QFMRKRIEAI RGQILSKLKL TSPPEDYPEP |
| 61 | EEVPPEVISI YNSTRDLLQE KASRRAAACE RERSDEEYYA KEVYKIDMPP FFPSENAIPP |
| 121 | TFYRPYFRIV RFDVSAMEKN ASNLVKAEFR VFRLQNPKAR VPEQRIELYQ ILKSKDLTSP |
| 181 | TQRYIDSKVV KTRAEGEWLS FDVTDAVHEW LHHKDRNLGF KISLHCPCCT FVPSNNYIIP |
| 241 | NKSEELEARF AGIDGTSTYT SGDQKTIKST RKKNSGKTPH LLLMLLPSYR LESQQTNRRK |
| 301 | KRALDAAYCF RNVQDNCCLR PLYIDFKRDL GWKWIHEPKG YNANFCAGAC PYLWSSDTQH |
| 361 | SRVLSLYNTI NPEASASPCC VSQDLEPLTI LYYIGKTPKI EQLSNMIVKS CKCS |

SEQ ID NO: 208
TRANSFORMING GROWTH FACTOR BETA 2 (TGFB2), ISOFORM CRA_A
EAW93326.1

| | |
|---|---|
| 1 | MHYCVLSAFL ILHLVTVALS LSTCSTLDMD QFMRKRIEAI RGQILSKLKL TSPPEDYPEP |
| 61 | EEVPPEVISI YNSTRDLLQE KASRRAAACE RERSDEEYYA KEVYKIDMPP FFPSETVCPV |
| 121 | VTTPSGSVGS LCSRQSQVLC GYLDAIPPTF YRPYFRIVRF DVSAMEKNAS NLVKAEFRVF |
| 181 | RLQNPKARVP EQRIELYQIL KSKDLTSPTQ RYIDSKVVKT RAEGEWLSFD VTDAVHEWLH |
| 241 | HKDRNLGFKI SLHCPCCTFV PSNNYIIPNK SEELEARFAG IDGTSTYTSG DQKTIKSTRK |
| 301 | KNSGKTPHLL LMLLPSYRLE SQQTNRRKKR ALDAAYCFRN VQDNCCLRPL YIDFKRDLGW |
| 361 | KWIHEPKGYN ANFCAGACPY LWSSDTQHSR VLSLYNTINP EASASPCCVS QDLEPLTILY |
| 421 | YIGKTPKIEQ LSNMIVKSCK CS |

SEQ ID NO: 209
TRANSFORMING GROWTH FACTOR BETA 2 (TGFB2), ISOFORM CRA_B
EAW93327.1

| | |
|---|---|
| 1 | MHYCVLSAFL ILHLVTVALS LSTCSTLDMD QFMRKRIEAI RGQILSKLKL TSPPEDYPEP |
| 61 | EEVPPEVISI YNSTRDLLQE KASRRAAACE RERSDEEYYA KEVYKIDMPP FFPSENAIPP |
| 121 | TFYRPYFRIV RFDVSAMEKN ASNLVKAEFR VFRLQNPKAR VPEQRIELYQ ILKSKDLTSP |
| 181 | TQRYIDSKVV KTRAEGEWLS FDVTDAVHEW LHHKDRNLGF KISLHCPCCT FVPSNNYIIP |
| 241 | NKSEELEARF AGIDGTSTYT SGDQKTIKST RKKNSGKTPH LLLMLLPSYR LESQQTNRRK |
| 301 | KRALDAAYCF RNVQDNCCLR PLYIDFKRDL GWKWIHEPKG YNANFCAGAC PYLWSSDTQH |
| 361 | SRVLSLYNTI NPEASASPCC VSQDLEPLTI LYYIGKTPKI EQLSNMIVKS CKCS |

SEQ ID NO: 210
BRAIN DERIVED NEUROTROPHIC FACTOR (BDNF)
AAO15434.1

| | |
|---|---|
| 1 | MTILFLTMVI SYFGCMKAAP MKEANIRGQG GLAYPGVRTH GTLESVNGPK AGSRGLTSLA |
| 61 | DTFEHVIEEL LDEDQKVRPN EENNKDADLY TSRVMLSSQV PLEPPLLFLL EEYKNYLDAA |
| 121 | NMSMRVRRHS DPARRGELSV CDSISEWVTA ADKKTAVDMS GGTVTVLEKV PVSKGQLKQY |
| 181 | FYETKCNPMG YTKEGCRGID KRHWNSQCRT TQSYVRALTM DSKKRIGWRF IRIDTSCVCT |
| 241 | LTIKRGR |

SEQ ID NO: 211
CILIARY NEUROTROPHIC FACTOR (CNTF)
NP_000605.1

| | |
|---|---|
| 1 | MAFTEHSPLT PHRRDLCSRS IWLARKIRSD LTALTESYVK HQGLNKNINL DSADGMPVAS |
| 61 | TDQWSELTEA ERLQENLQAY RTFHVLLARL LEDQQVHFTP TEGDFHQAIH TLLLQVAAFA |
| 121 | YQIEELMILL EYKIPRNEAD GMPINVGDGG LFEKKLWGLK VLQELSQWTV RSIHDLRFIS |
| 181 | SHQTGIPARG SHYIANNKKM |

SEQ ID NO: 212
PROSTAGLANDIN-ENDOPEROXIDE SYNTHASE 2 (PTGS2)
BAA05698.1

| | |
|---|---|
| 1 | MLARALLLCA VLALSHTANP CCSHPCQNRG VCMSVGFDQY KCDCTRTGFY GENCSTPEFL |
| 61 | TRIKLFLKPT PNTVHYILTH FKGFWNVVNN IPFLRNAIMS YVLTSRSHLI DSPPTYNADY |
| 121 | GYKSWEAFSN LSYYTRALPP VPDDCPTPLG VKGKKQLPDS NEIVEKLLLR RKFIPDPQGS |
| 181 | NMMFAFFAQH FTHQFFKTDH KRGPAFTNGL GHGVDLNHIY GETLARQRKL RLFKDGKMKY |
| 241 | QIIDGEMYPP TVKDTQAEMI YPPQVPEHLR FAVGQEVFGL VPGLMMYATI WLREHNRVCD |
| 301 | VLKQEHPEWG DEQLFQTSRL ILIGETIKIV IEDYVQHLSG YHFKLKFDPE LLFNKQFQYQ |
| 361 | NRIAAEFNTL YHWHPLLPDT FQIHDQKYNY QQFIYNNSIL LEHGITQFVE SFTRQIAGRV |
| 421 | AGGRNVPPAV QKVSQASIDQ SRQMKYQSFN EYRKRFMLKP YESFEELTGE KEMSAELEAL |
| 481 | YGDIDAVELY PALLVEKPRP DAIFGETMVE VGAPFSLKGL MGNVICSPAY WKPSTFGGEV |
| 541 | GFQIINTASI QSLICNNVKG CPFTSFSVPD PELIKTVTIN ASSSRSGLDD INPTVLLKER |
| 601 | STEL |

SEQ ID NO: 213
PROSTAGLANDIN F RECEPTOR (PTGFR)
AAQ76788.1

| | |
|---|---|
| 1 | MSMNNSKQLV SPAAALLSNT TCQTENRLSV FFSVIFMTVG ILSNSLAIAI LMKAYQRFRQ |
| 61 | KSKASFLLLA SGLVITDFFG HLINGAIAVF VYASDKEWIR FDQSNVLCSI FGICMVFSGL |
| 121 | CPLLLGSVMA IERCIGVTKP IFHSTKITSK HVKMMLSGVC LFAVFIALLP ILGHRDYKIQ |
| 181 | ASRTWCFYNT EDIKDWEDRF YLLLFSFLGL LALGVSLLCN AITGITLLRV KFKSQQHRQG |
| 241 | RSHHLEMVIQ LLAIMCVSCI CWSPFLVTMA NIGINGNHSL ETCETTLFAL RMATWNQILD |
| 301 | PWVYILLRKA VLKNLYKLAS QCCGVHVISL HIWELSSIKN SLKVAAISES PVAEKSAST |

SEQ ID NO: 214
PROSTAGLANDIN F RECEPTOR (PTGFR), ISOFORM CRA_A
EAX06350.1

| | |
|---|---|
| 1 | MSMNNSKQLV SPAAALLSNT TCQTENRLSV FFSVIFMTVG ILSNSLAIAI LMKAYQRFRQ |
| 61 | KSKASFLLLA SGLVITDFFG HLINGAIAVF VYASDKEWIR FDQSNVLCSI FGICMVFSGL |
| 121 | CPLLLGSVMA IERCIGVTKP IFHSTKITSK HVKMMLSGVC LFAVFIALLP ILGHRDYKIQ |
| 181 | ASRTWCFYNT EDIKDWEDRF YLLLFSFLGL LALGVSLLCN AITGITLLRV KFKSQQHRQG |
| 241 | RSHHLEMVIQ LLAIMCVSCI CWSPFLVTMA NIGINGNHSL ETCETTLFAL RMATWNQILD |
| 301 | PWVYILLRKA VLKNLYKLAS QCCGVHVISL HIWELSSIKN SLKVAAISES PVAEKSAST |

SEQ ID NO: 215
PROSTAGLANDIN F RECEPTOR (PTGFR), ISOFORM CRA_B
EAX06351.1

| | |
|---|---|
| 1 | MSMNNSKQLV SPAAALLSNT TCQTENRLSV FFSVIFMTVG ILSNSLAIAI LMKAYQRFRQ |
| 61 | KSKASFLLLA SGLVITDFFG HLINGAIAVF VYASDKEWIR FDQSNVLCSI FGICMVFSGL |
| 121 | CPLLLGSVMA IERCIGVTKP IFHSTKITSK HVKMMLSGVC LFAVFIALLP ILGHRDYKIQ |
| 181 | ASRTWCFYNT EDIKDWEDRF YLLLFSFLGL LALGVSLLCN AITGITLLRV KFKSQQHRQG |
| 241 | RSHHLEMVIQ LLAIMCVSCI CWSPFLGYRI ILNGKEKYKV YEEQSDFLHR LQWPTLE |

SEQ ID NO: 216
HYALURONIDASE
AAC70915.1

| | |
|---|---|
| 1 | MTTQLGPALV LGVALCLGCG QPLPQVPERP FSVLWNVPSA HCEARFGVHL PLNALGIIAN |
| 61 | RGQHFHGQNM TIFYKNQLGL YPYFGPRGTA HNGGIPQALP LDRHLALAAY QIHHSLRPGF |
| 121 | AGPAVLDWEE WCPLWAGNWG RRRAYQAASW AWAQQVFPDL DPQEQLYKAY TGFEQAARAL |
| 181 | MEDTLRVAQA LRPHGLWGFY HYPACGNGWH SMASNYTGRC HAATLARNTQ LHWLWAASSA |
| 241 | LFPSIYLPPR LPPAHHQAFV RHRLEEAFRV ALVGHRHPLP VLAYVRLTHR RSGRFLSQDD |
| 301 | LVQSIGVSAA LGAAGVVLWG DLSLSSSEEE CWHLHDYLVD TLGPYVINVT RAAMACSHQR |
| 361 | CHGHGRCARR DPGQMEAFLH LWPDGSLGDW KSFSCHCYWG WAGPTCQEPS LGLKKQYKAR |
| 421 | APATASSFPC CHFSSPGTTL SHSCSIQFTV NPPKHTPRFP WNP |

SEQ ID NO: 217
PIGMENT EPITHELIUM-DERIVED FACTOR (PEDF);
P36955.4

| | |
|---|---|
| 1 | MQALVLLLCI GALLGHSSCQ NPASPPEEGS PDPDSTGALV EEEDPFFKVP VNKLAAAVSN |
| 61 | FGYDLYRVRS STSPTTNVLL SPLSVATALS ALSLGAEQRT ESIIHRALYY DLISSPDIHG |
| 121 | TYKELLDTVT APQKNLKSAS RIVFEKKLRI KSSFVAPLEK SYGTRPRVLT GNPRLDLQEI |
| 181 | NNWVQAQMKG KLARSTKEIP DEISILLLGV AHFKGQWVTK FDSRKTSLED FYLDEERTVR |
| 241 | VPMMSDPKAV LRYGLDSDLS CKIAQLPLTG SMSIIFFLPL KVTQNLTLIE ESLTSEFIHD |
| 301 | IDRELKTVQA VLTVPKLKLS YEGEVTKSLQ EMKLQSLFDS PDFSKITGKP IKLTQVEHRA |
| 361 | GFEWNEDGAG TTPSPGLQPA HLTFPLDYHL NQPFIFVLRD TDTGALLFIG KILDPRGP |

SEQ ID NO: 218
PIGMENT EPITHELIUM-DERIVED FACTOR (PEDF); ISOFORM 1 PRECURSOR
NP_001316832.1

| | |
|---|---|
| 1 | MQALVLLLCI GALLGHSSCQ NPASPPEEGS PDPDSTGALV EEEDPFFKVP VNKLAAAVSN |
| 61 | FGYDLYRVRS STSPTTNVLL SPLSVATALS ALSLGAEQRT ESIIHRALYY DLISSPDIHG |
| 121 | TYKELLDTVT APQKNLKSAS RIVFEKKLRI KSSFVAPLEK SYGTRPRVLT GNPRLDLQEI |
| 181 | NNWVQAQMKG KLARSTKEIP DEISILLLGV AHFKGQWVTK FDSRKTSLED FYLDEERTVR |
| 241 | VPMMSDPKAV LRYGLDSDLS CKIAQLPLTG SMSIIFFLPL KVTQNLTLIE ESLTSEFIHD |
| 301 | IDRELKTVQA VLTVPKLKLS YEGEVTKSLQ EMKLQSLFDS PDFSKITGKP IKLTQVEHRA |
| 361 | GFEWNEDGAG TTPSPGLQPA HLTFPLDYHL NQPFIFVLRD TDTGALLFIG KILDPRGP |

SEQ ID NO: 219
PIGMENT EPITHELIUM-DERIVED FACTOR (PEDF); ISOFORM 2
NP_001316834.1

| | |
|---|---|
| 1 | MKGKLARSTK EIPDEISILL LGVAHFKGQW VTKFDSRKTS LEDFYLDEER TVRVPMMSDP |
| 61 | KAVLRYGLDS DLSCKIAQLP LTGSMSIIFF LPLKVTQNLT LIEESLTSEF IHDIDRELKT |
| 121 | VQAVLTVPKL KLSYEGEVTK SLQEMKLQSL FDSPDFSKIT GKPIKLTQVE HRAGFEWNED |
| 181 | GAGTTPSPGL QPAHLTFPLD YHLNQPFIFV LRDTDTGALL FIGKILDPRG P |

SEQ ID NO: 220
VASCULAR ENDOTHELIAL GROWTH FACTOR (VEGF)
CAA44447.1

| | |
|---|---|
| 1 | MNFLLSWVHW SLALLLYLHH AKWSQAAPMA EGGGQNHHEV VKFMDVYQRS YCHPIETLVD |
| 61 | IFQEYPDEIE YIFKPSCVPL MRCGGCCNDE GLECVPTEES NITMQIMRIK PHQGQHIGEM |
| 121 | SFLQHNKCEC RPKKDRARQE NPCGPCSERR KHLFVQDPQT CKCSCKNTDS RCKARQLELN |
| 181 | ERTCRCDKPR R |

SEQ ID NO: 221
PLACENTAL GROWTH FACTOR (PGF)
AAH07789.1

| | |
|---|---|
| 1 | MPVMRLFPCF LQLLAGLALP AVPPQQWALS AGNGSSEVEV VPFQEVWGRS YCRALERLVD |
| 61 | VVSEYPSEVE HMFSPSCVSL LRCTGCCGDE NLHCVPVETA NVTMQLLKIR SGDRPSYVEL |
| 121 | TFSQHVRCEC RPLREKMKPE RRRPKGRGKR RREKQRPTDC HLCGDAVPRR |

SEQ ID NO: 222
MYOCILIN (MYOC)
BAA24532.1

| | |
|---|---|
| 1 | MPAVQLLLLA CLVWDVGART AQLRKANDQS GRCQYTFSVA SPNESSCPEQ SQAMSVIHNL |
| 61 | QRDSSTQRLD LEATKARLSS LESLLHQLTL DQAARPQETQ EGLQRELGTL RRERDQLETQ |
| 121 | TRELETAYSN LLRDKSVLEE EKKRLRQENE NLARRLESSS QEVARLRRGQ CPQTRDTARA |
| 181 | VPPGSREVST WNLDTLAFQE LKSELTEVPA SRILKESPSG YLRSGEGDTG CGELVWVGEP |
| 241 | LTLRTAETIT GKYGVWMRDP KPTYPYTQET TWRIDTVGTD VRQVFEYDLI SQFMQGYPSK |
| 301 | VHILPRPLES TGAVVYSGSL YFQGAESRTV IRYELNTETV KAEKEIPGAG YHGQFPYSWG |
| 361 | GYTDIDLAVD EAGLWVIYST DEAKGAIVLS KLNPENLELE QTWETNIRKQ SVANAFIICG |
| 421 | TLYTVSSYTS ADATVNFAYD TGTGISKTLT IPFKNRYKYS SMIDYNPLEK KLFAWDNLNM |
| 481 | VTYDIKLSKM |

SEQ ID NO: 223
C-C MOTIF CHEMOKINE RECEPTOR 5 (CCR5)
NP_001093638.1

| | |
|---|---|
| 1 | MDYQVSSPIY DINYYTSEPC QKINVKQIAA RLLPPLYSLV FIFGFVGNML VILILINCKR |
| 61 | LKSMTDIYLL NLAISDLFFL LTVPFWAHYA AAQWDFGNTM CQLLTGLYFI GFFSGIFFII |
| 121 | LLTIDRYLAV VHAVFALKAR TVTFGVVTSV ITWVVAVFAS LPGIIFTRSQ KEGLHYTCSS |
| 181 | HFPYSQYQFW KNFQTLKIVI LGLVLPLLVM VICYSGILKT LLRCRNEKKR HRAVRLIFTI |
| 241 | MIVYFLFWAP YNIVLLLNTF QEFFGLNNCS SSNRLDQAMQ VTETLGMTHC CINPIIYAFV |
| 301 | GEKFRNYLLV FFQKHIAKRF CKCCSIFQQE APERASSVYT RSTGEQEISV GL |

SEQ ID NO: 224
CD19
AAB60697.1

| | |
|---|---|
| 1 | MPPPRLLFFL LFLTPMEVRP EEPLVVKVEG EGDNAVLQCL KGTSDGPTQQ LTWSRESPLK |
| 61 | PFLKLSLGLP GLGIHMRPLA SWLFIFNVSQ QMGGFYLCQP GPPSEKAWQP GWTVNVEGSG |
| 121 | ELFRWNVSDL GGLGCGLKNR SSEGPSSPSG KLMSPKLYVW AKDRPEIWEG EPPCVPPRDS |
| 181 | LNQSLSQDLT MAPGSTLWLS CGVPPDSVSR GPLSWTHVHP KGPKSLLSLE LKDDRPARDM |
| 241 | WVMETGLLLP RATAQDAGKY YCHRGNLTMS FHLEITARPV LWHWLLRTGG WKVSAVTLAY |
| 301 | LIFCLCSLVG ILHLQRALVL RRKRKRMTDP TRRFFKVTPP PGSGPQNQYG NVLSLPTPTS |
| 361 | GLGRAQRWAA GLGGTAPSYG NPSSDVQADG ALGSRSPPGV GPEEEEGEGY EEPDSEEDSE |
| 421 | FYENDSNLGQ DQLSQDGSGY ENPEDEPLGP EDEDSFSNAE SYENEDEELT QPVARTMDFL |
| 481 | SPHGSAWDPS REATSLGSQS YEDMRGILYA APQLRSIRGQ PGPNHEEDAD SYENMDNPDG |
| 541 | PDPAWGGGGR MGTWSTR |

SEQ ID NO: 225
CRUMBS CELL POLARITY COMPLEX COMPONENT 2 (CRB2), PRECURSOR
NP_775960.4

| | |
|---|---|
| 1 | MALARPGTPD PQALASVLLL LLWAPALSLL AGTVPSEPPS ACASDPCAPG TECQATESGG |
| 61 | YTCGPMEPRG CATQPCHHGA LCVPQGPDPT GFRCYCVPGF QGPRCELDID ECASRPCHHG |
| 121 | ATCRNLADRY ECHCPLGYAG VTCEMEVDEC ASAPCLHGGS CLDGVGSFRC VCAPGYGGTR |
| 181 | CQLDLDECQS QPCAHGGTCH DLVNGFRCDC AGTGYEGTHC EREVLECASA PCEHNASCLE |
| 241 | GLGSFRCLCW PGYSGELCEV DEDECASSPC QHGGRCLQRS DPALYGGVQA AFPGAFSFRH |
| 301 | AAGFLCHCPP GFEGADCGVE VDECASRPCL NGGHCQDLPN GFQCHCPDGY AGPTCEEDVD |
| 361 | ECLSDPCLHG GTCSDTVAGY ICRCPETWGG RDCSVQLTGC QGHTCPLAAT CIPIFESGVH |
| 421 | SYVCHCPPGT HGPFCGQNTT FSVMAGSPIQ ASVPAGGPLG LALRFRTTLP AGTLATRNDT |
| 481 | KESLELALVA ATLQATLWSY STTVLVLRLP DLALNDGHWH QVEVVLHLAT LELRLWHEGC |
| 541 | PARLCVASGP VALASTASAT PLPAGISSAQ LGDATFAGCL QDVRVDGHLL LPEDLGENVL |
| 601 | LGCERREQCR PLPCVHGGSC VDLWTHFRCD CARPHRGPTC ADEIPAATFG LGGAPSSASF |
| 661 | LLQELPGPNL TVSFLLRTRE SAGLLLQFAN DSAAGLTVFL SEGRIRAEVP GSPAVVLPGR |
| 721 | WDDGLRHLVM LSFGPDQLQD LGQHVHVGGR LLAADSQPWG GPFRGCLQDL RLDGCHLPFF |
| 781 | PLPLDNSSQP SELGGRQSWN LTAGCVSEDM CSPDPCFNGG TCLVTWNDFH CTCPANFTGP |
| 841 | TCAQQLWCPG QPCLPPATCE EVPDGFVCVA EATFREGPPA AFSGHNASSG RLLGGLSLAF |
| 901 | RTRDSEAWLL RAAAGALEGV WLAVRNGSLA GGVRGGHGLP GAVLPIPGPR VADGAWHRVR |
| 961 | LAMERPAATT SRWLLWLDGA ATPVALRGLA SDLGFLQGPG AVRILLAENF TGCLGRVALG |
| 1021 | GLPLPLARPR PGAAPGAREH FASWPGTPAP ILGCRGAPVC APSPCLHDGA CRDLFDAFAC |
| 1081 | ACGPGWEGPR CEAHVDPCHS APCARGRCHT HPDGRFECRC PPGFGGPRCR LPVPSKECSL |
| 1141 | NVTCLDGSPC EGGSPAANCS CLEGLAGQRC QVPTLPCEAN PCLNGGTCRA AGGVSECICN |
| 1201 | ARFSGQFCEV AKGLPLPLPF PLLEVAVPAA CACLLLLLLG LLSGILAARK RRQSEGTYSP |
| 1261 | SQQEVAGARL EMDSVLKVPP EERLI |

SEQ ID NO: 226
CRUMBS CELL POLARITY COMPLEX COMPONENT 2 (CRB2), ISOFORM X1
XP_011516858.1

| | |
|---|---|
| 1 | MALARPGTPD PQALASVLLL LLWAPALSLL AGTVPSEPPS ACASDPCAPG TECQATESGG |
| 61 | YTCGPMEPRG CATQPCHHGA LCVPQGPDPT GFRCYCVPGF QGPRCELDID ECASRPCHHG |
| 121 | ATCRNLADRY ECHCPLGYAG VTCEMEVDEC ASAPCLHGGS CLDGVGSFRC VCAPGYGGTR |
| 181 | CQLDLDECQS QPCAHGGTCH DLVNGFRCDC AGTGYEGTHC EREVLECASA PCEHNASCLE |
| 241 | GLGSFRCLCW PGYSGELCEV DEDECASSPC QHGGRCLQRS DPALYGGVQA AFPGAFSFRH |
| 301 | AAGFLCHCPP GFEGADCGVE VDECASRPCL NGGHCQDLPN GFQCHCPDGY AGPTCEEDVD |
| 361 | ECLSDPCLHG GTCSDTVAGY ICRCPETWGG RDCSVQLTGC QGHTCPLAAT CIPIFESGVH |
| 421 | SYVCHCPPGT HGPFCGQNTT FSVMAGSPIQ ASVPAGGPLG LALRFRTTLP AGTLATRNDT |
| 481 | KESLELALVA ATLQATLWSY STTVLVLRLP DLALNDGHWH QVEVVLHLAT LELRLWHEGC |
| 541 | PARLCVASGP VALASTASAT PLPAGISSAQ LGDATFAGCL QDVRVDGHLL LPEDLGENVL |
| 601 | LGCERREQCR PLPCVHGGSC VDLWTHFRCD CARPHRGPTC ADEIPAATFG LGGAPSSASF |
| 661 | LLQELPGPNL TVSFLLRTRE SAGLLLQFAN DSAAGLTVFL SEGRIRAEVP GSPAVVLPGR |
| 721 | WDDGLRHLVM LSFGPDQLQD LGQHVHVGGR LLAADSQPWG GPFRGCLQDL RLDGCHLPFF |
| 781 | PLPLDNSSQP SELGGRQSWN LTAGCVSEDM CSPDPCFNGG TCLVTWNDFH CTCPANFTGP |
| 841 | TCAQQLWCPG QPCLPPATCV AEATFREGPP AAFSGHNASS GRLLGGLSLA FRTRDSEAWL |
| 901 | LRAAAGALEG VWLAVRNGSL AGGVRGGHGL PGAVLPIPGP RVADGAWHRV RLAMERPAAT |
| 961 | TSRWLLWLDG AATPVALRGL ASDLGFLQGP GAVRILLAEN FTGCLGRVAL GGLPLPLARP |
| 1021 | RPGAAPGARE HFASWPGTPA PILGCRGAPV CAPSPCLHDG ACRDLFDAFA CACGPGWEGP |
| 1081 | RCEAHVDPCH SAPCARGRCH THPDGRFECR CPPGFGGPRC RLPVPSKECS LNVTCLDGSP |
| 1141 | CEGGSPAANC SCLEGLAGQR CQVPTLPCEA NPCLNGGTCR AAGGVSECIC NARFSGQFCE |
| 1201 | VAKGLPLPLP FPLLEVAVPA ACACLLLLLL GLLSGILAAR KRRQSEGTYS PSQQEVAGAR |
| 1261 | LEMDSVLKVP PEERLI |

SEQ ID NO: 227
CRUMBS CELL POLARITY COMPLEX COMPONENT 2 (CRB2), ISOFORM X2
XP_011516860.1

| | |
|---|---|
| 1 | MEPRGCATQP CHHGALCVPQ GPDPTGFRCY CVPGFQGPRC ELDIDECASR PCHHGATCRN |
| 61 | LADRYECHCP LGYAGVTCEM EVDECASAPC LHGGSCLDGV GSFRCVCAPG YGGTRCQLDL |
| 121 | DECQSQPCAH GGTCHDLVNG FRCDCAGTGY EGTHCEREVL ECASAPCEHN ASCLEGLGSF |
| 181 | RCLCWPGYSG ELCEVDEDEC ASSPCQHGGR CLQRSDPALY GGVQAAFPGA FSFRHAAGFL |
| 241 | CHCPPGFEGA DCGVEVDECA SRPCLNGGHC QDLPNGFQCH CPDGYAGPTC EEDVDECLSD |
| 301 | PCLHGGTCSD TVAGYICRCP ETWGGRDCSV QLTGCQGHTC PLAATCIPIF ESGVHSYVCH |
| 361 | CPPGTHGPFC GQNTTFSVMA GSPIQASVPA GGPLGLALRF RTTLPAGTLA TRNDTKESLE |
| 421 | LALVAATLQA TLWSYSTTVL VLRLPDLALN DGHWHQVEVV LHLATLELRL WHEGCPARLC |
| 481 | VASGPVALAS TASATPLPAG ISSAQLGDAT FAGCLQDVRV DGHLLLPEDL GENVLLGCER |
| 541 | REQCRPLPCV HGGSCVDLWT HFRCDCARPH RGPTCADEIP AATFGLGGAP SSASFLLQEL |
| 601 | PGPNLTVSFL LRTRESAGLL LQFANDSAAG LTVFLSEGRI RAEVPGSPAV VLPGRWDDGL |
| 661 | RHLVMLSFGP DQLQDLGQHV HVGGRLLAAD SQPWGGPFRG CLQDLRLDGC HLPFFPLPLD |
| 721 | NSSQPSELGG RQSWNLTAGC VSEDMCSPDP CFNGGTCLVT WNDFHCTCPA NFTGPTCAQQ |
| 781 | LWCPGQPCLP PATCEEVPDG FVCVAEATFR EGPPAAFSGH NASSGRLLGG LSLAFRTRDS |
| 841 | EAWLLRAAAG ALEGVWLAVR NGSLAGGVRG GHGLPGAVLP IPGPRVADGA WHRVRLAMER |
| 901 | PAATTSRWLL WLDGAATPVA LRGLASDLGF LQGPGAVRIL LAENFTGCLG RVALGGLPLP |
| 961 | LARPRPGAAP GAREHFASWP GTPAPILGCR GAPVCAPSPC LHDGACRDLF DAFACACGPG |
| 1021 | WEGPRCEAHV DPCHSAPCAR GRCHTHPDGR FECRCPPGFG GPRCRLPVPS KECSLNVTCL |
| 1081 | DGSPCEGGSP AANCSCLEGL AGQRCQVPTL PCEANPCLNG GTCRAAGGVS ECICNARFSG |
| 1141 | QFCEVAKGLP LPLPFPLLEV AVPAACACLL LLLLGLLSGI LAARKRRQSE GTYSPSQQEV |
| 1201 | AGARLEMDSV LKVPPEERLI |

SEQ ID NO: 228
HISTONE DEACETYLASE 4 (HDAC4)
NP_006028.2

| | |
|---|---|
| 1 | MSSQSHPDGL SGRDQPVELL NPARVNHMPS TVDVATALPL QVAPSAVPMD LRLDHQFSLP |
| 61 | VAEPALREQQ LQQELLALKQ KQQIQRQILI AEFQRQHEQL SRQHEAQLHE HIKQQQEMLA |
| 121 | MKHQQELLEH QRKLERHRQE QELEKQHREQ KLQQLKNKEK GKESAVASTE VKMKLQEFVL |
| 181 | NKKKALAHRN LNHCISSDPR YWYGKTQHSS LDQSSPPQSG VSTSYNHPVL GMYDAKDDFP |
| 241 | LRKTASEPNL KLRSRLKQKV AERRSSPLLR RKDGPVVTAL KKRPLDVTDS ACSSAPGSGP |
| 301 | SSPNNSSGSV SAENGIAPAV PSIPAETSLA HRLVAREGSA APLPLYTSPS LPNITLGLPA |
| 361 | TGPSAGTAGQ QDAERLTLPA LQQRLSLFPG THLTPYLSTS PLERDGGAAH SPLLQHMVLL |
| 421 | EQPPAQAPLV TGLGALPLHA QSLVGADRVS PSIHKLRQHR PLGRTQSAPL PQNAQALQHL |
| 481 | VIQQQHQQFL EKHKQQFQQQ QLQMNKIIPK PSEPARQPES HPEETEEELR EHQALLDEPY |
| 541 | LDRLPGQKEA HAQAGVQVKQ EPIESDEEEA EPPREVEPGQ RQPSEQELLF RQQALLLEQQ |
| 601 | RIHQLRNYQA SMEAAGIPVS FGGHRPLSRA QSSPASATFP VSVQEPPTKP RFTTGLVYDT |
| 661 | LMLKHQCTCG SSSSHPEHAG RIQSIWSRLQ ETGLRGKCEC IRGRKATLEE LQTVHSEAHT |
| 721 | LLYGTNPLNR QKLDSKKLLG SLASVFVRLP CGGVGVDSDT IWNEVHSAGA ARLAVGCVVE |
| 781 | LVFKVATGEL KNGFAVVRPP GHHAEESTPM GFCYFNSVAV AAKLLQQRLS VSKILIVDWD |
| 841 | VHHGNGTQQA FYSDPSVLYM SLHRYDDGNF FPGSGAPDEV GTGPGVGFNV NMAFTGGLDP |
| 901 | PMGDAEYLAA FRTVVMPIAS EFAPDVVLVS SGFDAVEGHP TPLGGYNLSA RCFGYLTKQL |
| 961 | MGLAGGRIVL ALEGGHDLTA ICDASEACVS ALLGNELDPL PEKVLQQRPN ANAVRSMEKV |
| 1021 | MEIHSKYWRC LQRTTSTAGR SLIEAQTCEN EEAETVTAMA SLSVGVKPAE KRPDEEPMEE |
| 1081 | EPPL |

SEQ ID NO: 229
HISTONE DEACETYLASE 4 (HDAC4) ISOFORM X2
XP_006712940.1

| | |
|---|---|
| 1 | MNIDLCAFEI QKTSSPGYEV WFRKQYLAVD GDGLSGRDQP VELLNPARVN HMPSTVDVAT |
| 61 | ALPLQVAPSA VPMDLRLDHQ FSLPVAEPAL REQQLQQELL ALKQKQQIQR QILIAEFQRQ |
| 121 | HEQLSRQHEA QLHEHIKQQQ EMLAMKHQQE LLEHQRKLER HRQEQELEKQ HREQKLQQLK |
| 181 | NKEKGKESAV ASTEVKMKLQ EFVLNKKKAL AHRNLNHCIS SDPRYWYGKT QHSSLDQSSP |
| 241 | PQSGVSTSYN HPVLGMYDAK DDFPLRKTAS EPNLKLRSRL KQKVAERRSS PLLRRKDGPV |
| 301 | VTALKKRPLD VTDSACSSAP GSGPSSPNNS SGSVSAENGI APAVPSIPAE TSLAHRLVAR |
| 361 | EGSAAPLPLY TSPSLPNITL GLPATGPSAG TAGQQDAERL TLPALQQRLS LFPGTHLTPY |
| 421 | LSTSPLERDG GAAHSPLLQH MVLLEQPPAQ APLVTGLGAL PLHAQSLVGA DRVSPSIHKL |
| 481 | RQHRPLGRTQ SAPLPQNAQA LQHLVIQQQH QQFLEKHKQQ FQQQQLQMNK IIPKPSEPAR |
| 541 | QPESHPEETE EELREHQALL DEPYLDRLPG QKEAHAQAGV QVKQEPIESD EEEAEPPREV |
| 601 | EPGQRQPSEQ ELLFRQQALL LEQQRIHQLR NYQASMEAAG IPVSFGGHRP LSRAQSSPAS |
| 661 | ATFPVSVQEP PTKPRFTTGL VYDTLMLKHQ CTCGSSSSHP EHAGRIQSIW SRLQETGLRG |
| 721 | KCECIRGRKA TLEELQTVHS EAHTLLYGTN PLNRQKLDSK KLLGSLASVF VRLPCGGVGV |
| 781 | DSDTIWNEVH SAGAARLAVG CVVELVFKVA TGELKNGFAV VRPPGHHAEE STPMGFCYFN |
| 841 | SVAVAAKLLQ QRLSVSKILI VDWDVHHGNG TQQAFYSDPS VLYMSLHRYD DGNFFPGSGA |
| 901 | PDEVGTGPGV GFNVNMAFTG GLDPPMGDAE YLAAFRTVVM PIASEFAPDV VLVSSGFDAV |
| 961 | EGHPTPLGGY NLSARCFGYL TKQLMGLAGG RIVLALEGGH DLTAICDASE ACVSALLGNE |
| 1021 | LDPLPEKVLQ QRPNANAVRS MEKVMEIHSK YWRCLQRTTS TAGRSLIEAQ TCENEEAETV |
| 1081 | TAMASLSVGV KPAEKRPDEE PMEEEPPL |

SEQ ID NO: 230
HISTONE DEACETYLASE 4 (HDAC4) ISOFORM X3
XP_011510520.1

| | |
|---|---|
| 1 | MNIDLCAFEI QKTSSPGYEV WFRKQYLAVD GDGLSGRDQP VELLNPARVN HMPSTVDVAT |
| 61 | ALPLQVAPSA VPMDLRLDHQ FSLPVAEPAL REQQLQQELL ALKQKQQIQR QILIAEFQRQ |
| 121 | HEQLSRQHEA QLHEHIKQQQ EMLAMKHQQE LLEHQRKLER HRQEQELEKQ HREQKLQQLK |
| 181 | NKEKGKESAV ASTEVKMKLQ EFVLNKKKAL AHRNLNHCIS SDPRYWYGKT QHSSLDQSSP |
| 241 | PQSGVSTSYN HPVLGMYDAK DDFPLRKTAS EPNLKLRSRL KQKVAERRSS PLLRRKDGPV |
| 301 | VTALKKRPLD VTDSACSSAP GSGPSSPNNS SGSVSAENGI APAVPSIPAE TSLAHRLVAR |
| 361 | EGSAAPLPLY TSPSLPNITL GLPATGPSAG TAGQQDAERL TLPALQQRLS LFPGTHLTPY |
| 421 | LSTSPLERDG GAAHSPLLQH MVLLEQPPAQ APLVTDWYLS GLGALPLHAQ SLVGADRVSP |
| 481 | SIHKLRQHRP LGRTQSAPLP QNAQALQHLV IQQQHQQFLE KHKQQFQQQQ LQMNKIIPKP |
| 541 | SEPARQPESH PEETEEELRE HQALLDEPYL DRLPGQKEAH AQAGVQVKQE PIESDEEEAE |
| 601 | PPREVEPGQR QPSEQELLFR QQALLLEQQR IHQLRNYQAS MEAAGIPVSF GGHRPLSRAQ |
| 661 | SSPASATFPV SVQEPPTKPR FTTGLVYDTL MLKHQCTCGS SSSHPEHAGR IQSIWSRLQE |
| 721 | TGLRGKCECI RGRKATLEEL QTVHSEAHTL LYGTNPLNRQ KLDSSLASVF VRLPCGGVGV |
| 781 | DSDTIWNEVH SAGAARLAVG CVVELVFKVA TGELKNGFAV VRPPGHHAEE STPMGFCYFN |
| 841 | SVAVAAKLLQ QRLSVSKILI VDWDVHHGNG TQQAFYSDPS VLYMSLHRYD DGNFFPGSGA |
| 901 | PDEVGTGPGV GFNVNMAFTG GLDPPMGDAE YLAAFRTVVM PIASEFAPDV VLVSSGFDAV |
| 961 | EGHPTPLGGY NLSARCFGYL TKQLMGLAGG RIVLALEGGH DLTAICDASE ACVSALLGNE |
| 1021 | LDPLPEKVLQ QRPNANAVRS MEKVMEIHSK YWRCLQRTTS TAGRSLIEAQ TCENEEAETV |
| 1081 | TAMASLSVGV KPAEKRPDEE PMEEEPPL |

SEQ ID NO: 231
HISTONE DEACETYLASE 4 (HDAC4) ISOFORM X4
XP_011510521.1

| | |
|---|---|
| 1 | MNIDLCAFEI QKTSSPGYEV WFRKQYLAVD GDGLSGRDQP VELLNPARVN HMPSTVDVAT |
| 61 | ALPLQVAPSA VPMDLRLDHQ FSLPVAEPAL REQQLQQELL ALKQKQQIQR QILIAEFQRQ |
| 121 | HEQLSRQHEA QLHEHIKQQQ EMLAMKHQQE LLEHQRKLER HRQEQELEKQ HREQKLQQLK |
| 181 | NKEKGKESAV ASTEVKMKLQ EFVLNKKKAL AHRNLNHCIS SDPRYWYGKT QHSSLDQSSP |
| 241 | PQSGVSTSYN HPVLGMYDAK DDFPLRKTAS EPNLKLRSRL KQKVAERRSS PLLRRKDGPV |
| 301 | VTALKKRPLD VTDSACSSAP GSGPSSPNNS SGSVSAENGI APAVPSIPAE TSLAHRLVAR |
| 361 | EGSAAPLPLY TSPSLPNITL GLPATGPSAG TAGQQDAERL TLPALQQRLS LFPGTHLTPY |
| 421 | LSTSPLERDG GAAHSPLLQH MVLLEQPPAQ APLVTGLGAL PLHAQSLVGA DRVSPSIHKL |
| 481 | RQHRPLGRTQ SAPLPQNAQA LQHLVIQQQH QQFLEKHKQQ FQQQQLQMNK IIPKPSEPAR |
| 541 | QPESHPEETE EELREHQALL DEPYLDRLPG QKEAHAQAGV QVKQEPIESD EEEAEPPREV |
| 601 | EPGQRQPSEQ ELLFRQQALL LEQQRIHQLR NYQASMEAAG IPVSFGGHRP LSRAQSSPAS |
| 661 | ATFPVSVQEP PTKPRFTTGL VYDTLMLKHQ CTCGSSSSHP EHAGRIQSIW SRLQETGLRG |
| 721 | KCECIRGRKA TLEELQTVHS EAHTLLYGTN PLNRQKLDSS LASVFVRLPC GGVGVDSDTI |
| 781 | WNEVHSAGAA RLAVGCVVEL VFKVATGELK NGFAVVRPPG HHAEESTPMG FCYFNSVAVA |
| 841 | AKLLQQRLSV SKILIVDWDV HHGNGTQQAF YSDPSVLYMS LHRYDDGNFF PGSGAPDEVG |
| 901 | TGPGVGFNVN MAFTGGLDPP MGDAEYLAAF RTVVMPIASE FAPDVVLVSS GFDAVEGHPT |
| 961 | PLGGYNLSAR CFGYLTKQLM GLAGGRIVLA LEGGHDLTAI CDASEACVSA LLGNELDPLP |
| 1021 | EKVLQQRPNA NAVRSMEKVM EIHSKYWRCL QRTTSTAGRS LIEAQTCENE EAETVTAMAS |
| 1081 | LSVGVKPAEK RPDEEPMEEE PPL |

SEQ ID NO: 232
HISTONE DEACETYLASE 4 (HDAC4) ISOFORM X5
XP_011510522.1

| | |
|---|---|
| 1 | MRKLGPREDG LSGRDQPVEL LNPARVNHMP STVDVATALP LQVAPSAVPM DLRLDHQFSL |
| 61 | PVAEPALREQ QLQQELLALK QKQQIQRQIL IAEFQRQHEQ LSRQHEAQLH EHIKQQQEML |
| 121 | AMKHQQELLE HQRKLERHRQ EQELEKQHRE QKLQQLKNKE KGKESAVAST EVKMKLQEFV |
| 181 | LNKKKALAHR NLNHCISSDP RYWYGKTQHS SLDQSSPPQS GVSTSYNHPV LGMYDAKDDF |
| 241 | PLRKTASEPN LKLRSRLKQK VAERRSSPLL RRKDGPVVTA LKKRPLDVTD SACSSAPGSG |
| 301 | PSSPNNSSGS VSAENGIAPA VPSIPAETSL AHRLVAREGS AAPLPLYTSP SLPNITLGLP |
| 361 | ATGPSAGTAG QQDAERLTLP ALQQRLSLFP GTHLTPYLST SPLERDGGAA HSPLLQHMVL |
| 421 | LEQPPAQAPL VTDWYLSGLG ALPLHAQSLV GADRVSPSIH KLRQHRPLGR TQSAPLPQNA |
| 481 | QALQHLVIQQ QHQQFLEKHK QQFQQQQLQM NKIIPKPSEP ARQPESHPEE TEEELREHQA |
| 541 | LLDEPYLDRL PGQKEAHAQA GVQVKQEPIE SDEEEAEPPR EVEPGQRQPS EQELLFRQQA |
| 601 | LLLEQQRIHQ LRNYQASMEA AGIPVSFGGH RPLSRAQSSP ASATFPVSVQ EPPTKPRFTT |
| 661 | GLVYDTLMLK HQCTCGSSSS HPEHAGRIQS IWSRLQETGL RGKCECIRGR KATLEELQTV |
| 721 | HSEAHTLLYG TNPLNRQKLD SKKLLGSLAS VFVRLPCGGV GVDSDTIWNE VHSAGAARLA |
| 781 | VGCVVELVFK VATGELKNGF AVVRPPGHHA EESTPMGFCY FNSVAVAAKL LQQRLSVSKI |
| 841 | LIVDWDVHHG NGTQQAFYSD PSVLYMSLHR YDDGNFFPGS GAPDEVGTGP GVGFNVNMAF |
| 901 | TGGLDPPMGD AEYLAAFRTV VMPIASEFAP DVVLVSSGFD AVEGHPTPLG GYNLSARCFG |
| 961 | YLTKQLMGLA GGRIVLALEG GHDLTAICDA SEACVSALLG NELDPLPEKV LQQRPNANAV |
| 1021 | RSMEKVMEIH SKYWRCLQRT TSTAGRSLIE AQTCENEEAE TVTAMASLSV GVKPAEKRPD |
| 1081 | EEPMEEEPPL |

SEQ ID NO: 233
HISTONE DEACETYLASE 4 (HDAC4) ISOFORM X6
XP_011510523.1

| | |
|---|---|
| 1 | MSSQSHPDGL SGRDQPVELL NPARVNHMPS TVDVATALPL QVAPSAVPMD LRLDHQFSLP |
| 61 | VAEPALREQQ LQQELLALKQ KQQIQRQILI AEFQRQHEQL SRQHEAQLHE HIKQQQEMLA |
| 121 | MKHQQELLEH QRKLERHRQE QELEKQHREQ KLQQLKNKEK GKESAVASTE VKMKLQEFVL |
| 181 | NKKKALAHRN LNHCISSDPR YWYGKTQHSS LDQSSPPQSG VSTSYNHPVL GMYDAKDDFP |
| 241 | LRKTASEPNL KLRSRLKQKV AERRSSPLLR RKDGPVVTAL KKRPLDVTDS ACSSAPGSGP |
| 301 | SSPNNSSGSV SAENGIAPAV PSIPAETSLA HRLVAREGSA APLPLYTSPS LPNITLGLPA |
| 361 | TGPSAGTAGQ QDAERLTLPA LQQRLSLFPG THLTPYLSTS PLERDGGAAH SPLLQHMVLL |
| 421 | EQPPAQAPLV TDWYLSGLGA LPLHAQSLVG ADRVSPSIHK LRQHRPLGRT QSAPLPQNAQ |
| 481 | ALQHLVIQQQ HQQFLEKHKQ QFQQQQLQMN KIIPKPSEPA RQPESHPEET EEELREHQAL |
| 541 | LDEPYLDRLP GQKEAHAQAG VQVKQEPIES DEEEAEPPRE VEPGQRQPSE QELLFRQQAL |
| 601 | LLEQQRIHQL RNYQASMEAA GIPVSFGGHR PLSRAQSSPA SATFPVSVQE PPTKPRFTTG |
| 661 | LVYDTLMLKH QCTCGSSSSH PEHAGRIQSI WSRLQETGLR GKCECIRGRK ATLEELQTVH |
| 721 | SEAHTLLYGT NPLNRQKLDS KKLLGSLASV FVRLPCGGVG VDSDTIWNEV HSAGAARLAV |
| 781 | GCVVELVFKV ATGELKNGFA VVRPPGHHAE ESTPMGFCYF NSVAVAAKLL QQRLSVSKIL |
| 841 | IVDWDVHHGN GTQQAFYSDP SVLYMSLHRY DDGNFFPGSG APDEVGTGPG VGFNVNMAFT |
| 901 | GGLDPPMGDA EYLAAFRTVV MPIASEFAPD VVLVSSGFDA VEGHPTPLGG YNLSARCFGY |
| 961 | LTKQLMGLAG GRIVLALEGG HDLTAICDAS EACVSALLGN ELDPLPEKVL QQRPNANAVR |
| 1021 | SMEKVMEIHS KYWRCLQRTT STAGRSLIEA QTCENEEAET VTAMASLSVG VKPAEKRPDE |
| 1081 | EPMEEEPPL |

SEQ ID NO: 234
HISTONE DEACETYLASE 4 (HDAC4) ISOFORM X7
XP_011510526.1

| | |
|---|---|
| 1 | MFDGLSGRDQ PVELLNPARV NHMPSTVDVA TALPLQVAPS AVPMDLRLDH QFSLPVAEPA |
| 61 | LREQQLQQEL LALKQKQQIQ RQILIAEFQR QHEQLSRQHE AQLHEHIKQQ QEMLAMKHQQ |
| 121 | ELLEHQRKLE RHRQEQELEK QHREQKLQQL KNKEKGKESA VASTEVKMKL QEFVLNKKKA |
| 181 | LAHRNLNHCI SSDPRYWYGK TQHSSLDQSS PPQSGVSTSY NHPVLGMYDA KDDFPLRKTA |
| 241 | SEPNLKLRSR LKQKVAERRS SPLLRRKDGP VVTALKKRPL DVTDSACSSA PGSGPSSPNN |
| 301 | SSGSVSAENG IAPAVPSIPA ETSLAHRLVA REGSAAPLPL YTSPSLPNIT LGLPATGPSA |
| 361 | GTAGQQDAER LTLPALQQRL SLFPGTHLTP YLSTSPLERD GGAAHSPLLQ HMVLLEQPPA |
| 421 | QAPLVTDWYL SGLGALPLHA QSLVGADRVS PSIHKLRQHR PLGRTQSAPL PQNAQALQHL |
| 481 | VIQQQHQQFL EKHKQQFQQQ QLQMNKIIPK PSEPARQPES HPEETEEELR EHQALLDEPY |
| 541 | LDRLPGQKEA HAQAGVQVKQ EPIESDEEEA EPPREVEPGQ RQPSEQELLF RQQALLLEQQ |
| 601 | RIHQLRNYQA SMEAAGIPVS FGGHRPLSRA QSSPASATFP VSVQEPPTKP RFTTGLVYDT |
| 661 | LMLKHQCTCG SSSSHPEHAG RIQSIWSRLQ ETGLRGKCEC IRGRKATLEE LQTVHSEAHT |
| 721 | LLYGTNPLNR QKLDSKKLLG SLASVFVRLP CGGVGVDSDT IWNEVHSAGA ARLAVGCVVE |
| 781 | LVFKVATGEL KNGFAVVRPP GHHAEESTPM GFCYFNSVAV AAKLLQQRLS VSKILIVDWD |
| 841 | VHHGNGTQQA FYSDPSVLYM SLHRYDDGNF FPGSGAPDEV GTGPGVGFNV NMAFTGGLDP |
| 901 | PMGDAEYLAA FRTVVMPIAS EFAPDVVLVS SGFDAVEGHP TPLGGYNLSA RCFGYLTKQL |
| 961 | MGLAGGRIVL ALEGGHDLTA ICDASEACVS ALLGNELDPL PEKVLQQRPN ANAVRSMEKV |
| 1021 | MEIHSKYWRC LQRTTSTAGR SLIEAQTCEN EEAETVTAMA SLSVGVKPAE KRPDEEPMEE |
| 1081 | EPPL |

SEQ ID NO: 235
HISTONE DEACETYLASE 4 (HDAC4) ISOFORM X8
XP_011510527.1

| | |
|---|---|
| 1 | MFDGLSGRDQ PVELLNPARV NHMPSTVDVA TALPLQVAPS AVPMDLRLDH QFSLPVAEPA |
| 61 | LREQQLQQEL LALKQKQQIQ RQILIAEFQR QHEQLSRQHE AQLHEHIKQQ QEMLAMKHQQ |
| 121 | ELLEHQRKLE RHRQEQELEK QHREQKLQQL KNKEKGKESA VASTEVKMKL QEFVLNKKKA |
| 181 | LAHRNLNHCI SSDPRYWYGK TQHSSLDQSS PPQSGVSTSY NHPVLGMYDA KDDFPLRKTA |
| 241 | SEPNLKLRSR LKQKVAERRS SPLLRRKDGP VVTALKKRPL DVTDSACSSA PGSGPSSPNN |
| 301 | SSGSVSAENG IAPAVPSIPA ETSLAHRLVA REGSAAPLPL YTSPSLPNIT LGLPATGPSA |
| 361 | GTAGQQDAER LTLPALQQRL SLFPGTHLTP YLSTSPLERD GGAAHSPLLQ HMVLLEQPPA |
| 421 | QAPLVTGLGA LPLHAQSLVG ADRVSPSIHK LRQHRPLGRT QSAPLPQNAQ ALQHLVIQQQ |
| 481 | HQQFLEKHKQ QFQQQQLQMN KIIPKPSEPA RQPESHPEET EEELREHQAL LDEPYLDRLP |
| 541 | GQKEAHAQAG VQVKQEPIES DEEEAEPPRE VEPGQRQPSE QELLFRQQAL LLEQQRIHQL |
| 601 | RNYQASMEAA GIPVSFGGHR PLSRAQSSPA SATFPVSVQE PPTKPRFTTG LVYDTLMLKH |
| 661 | QCTCGSSSSH PEHAGRIQSI WSRLQETGLR GKCECIRGRK ATLEELQTVH SEAHTLLYGT |
| 721 | NPLNRQKLDS KKLLGSLASV FVRLPCGGVG VDSDTIWNEV HSAGAARLAV GCVVELVFKV |
| 781 | ATGELKNGFA VVRPPGHHAE ESTPMGFCYF NSVAVAAKLL QQRLSVSKIL IVDWDVHHGN |
| 841 | GTQQAFYSDP SVLYMSLHRY DDGNFFPGSG APDEVGTGPG VGFNVNMAFT GGLDPPMGDA |
| 901 | EYLAAFRTVV MPIASEFAPD VVLVSSGFDA VEGHPTPLGG YNLSARCFGY LTKQLMGLAG |
| 961 | GRIVLALEGG HDLTAICDAS EACVSALLGN ELDPLPEKVL QQRPNANAVR SMEKVMEIHS |
| 1021 | KYWRCLQRTT STAGRSLIEA QTCENEEAET VTAMASLSVG VKPAEKRPDE EPMEEEPPL |

SEQ ID NO: 236
HISTONE DEACETYLASE 4 (HDAC4) ISOFORM X9
XP_016860883.1

| | |
|---|---|
| 1 | MNIDLCAFEI QKTSSPGYEV WFRKQYLAVD GDGLSGRDQP VELLNPARVN HMPSTVDVAT |
| 61 | ALPLQVAPSA VPMDLRLDHQ FSLPVAEPAL REQQLQQELL ALKQKQQIQR QILIAEFQRQ |
| 121 | HEQLSRQHEA QLHEHIKQQQ EMLAMKHQQE LLEHQRKLER HRQEQELEKQ HREQKLQQLK |
| 181 | NKEKGKESAV ASTEVKMKLQ EFVLNKKKAL AHRNLNHCIS SDPRYWYGKT QHSSLDQSSP |
| 241 | PQSGVSTSYN HPVLGMYDAK DDFPLRKTDS ACSSAPGSGP SSPNNSSGSV SAENGIAPAV |
| 301 | PSIPAETSLA HRLVAREGSA APLPLYTSPS LPNITLGLPA TGPSAGTAGQ QDAERLTLPA |
| 361 | LQQRLSLFPG THLTPYLSTS PLERDGGAAH SPLLQHMVLL EQPPAQAPLV TDWYLSGLGA |
| 421 | LPLHAQSLVG ADRVSPSIHK LRQHRPLGRT QSAPLPQNAQ ALQHLVIQQQ HQQFLEKHKQ |
| 481 | QFQQQQLQMN KIIPKPSEPA RQPESHPEET EEELREHQAL LDEPYLDRLP GQKEAHAQAG |
| 541 | VQVKQEPIES DEEEAEPPRE VEPGQRQPSE QELLFRQQAL LLEQQRIHQL RNYQASMEAA |
| 601 | GIPVSFGGHR PLSRAQSSPA SATFPVSVQE PPTKPRFTTG LVYDTLMLKH QCTCGSSSSH |
| 661 | PEHAGRIQSI WSRLQETGLR GKCECIRGRK ATLEELQTVH SEAHTLLYGT NPLNRQKLDS |
| 721 | KKLLGSLASV FVRLPCGGVG VDSDTIWNEV HSAGAARLAV GCVVELVFKV ATGELKNGFA |
| 781 | VVRPPGHHAE ESTPMGFCYF NSVAVAAKLL QQRLSVSKIL IVDWDVHHGN GTQQAFYSDP |
| 841 | SVLYMSLHRY DDGNFFPGSG APDEVGTGPG VGFNVNMAFT GGLDPPMGDA EYLAAFRTVV |
| 901 | MPIASEFAPD VVLVSSGFDA VEGHPTPLGG YNLSARCFGY LTKQLMGLAG GRIVLALEGG |
| 961 | HDLTAICDAS EACVSALLGN ELDPLPEKVL QQRPNANAVR SMEKVMEIHS KYWRCLQRTT |
| 1021 | STAGRSLIEA QTCENEEAET VTAMASLSVG VKPAEKRPDE EPMEEEPPL |

SEQ ID NO: 237
HISTONE DEACETYLASE 4 (HDAC4) ISOFORM X10
XP_011510528.1

| | |
|---|---|
| 1 | MSSQSHPVDV ATALPLQVAP SAVPMDLRLD HQFSLPVAEP ALREQQLQQE LLALKQKQQI |
| 61 | QRQILIAEFQ RQHEQLSRQH EAQLHEHIKQ QQEMLAMKHQ QELLEHQRKL ERHRQEQELE |
| 121 | KQHREQKLQQ LKNKEKGKES AVASTEVKMK LQEFVLNKKK ALAHRNLNHC ISSDPRYWYG |
| 181 | KTQHSSLDQS SPPQSGVSTS YNHPVLGMYD AKDDFPLRKT ASEPNLKLRS RLKQKVAERR |
| 241 | SSPLLRRKDG PVVTALKKRP LDVTDSACSS APGSGPSSPN NSSGSVSAEN GIAPAVPSIP |
| 301 | AETSLAHRLV AREGSAAPLP LYTSPSLPNI TLGLPATGPS AGTAGQQDAE RLTLPALQQR |
| 361 | LSLFPGTHLT PYLSTSPLER DGGAAHSPLL QHMVLLEQPP AQAPLVTDWY LSGLGALPLH |
| 421 | AQSLVGADRV SPSIHKLRQH RPLGRTQSAP LPQNAQALQH LVIQQQHQQF LEKHKQQFQQ |
| 481 | QQLQMNKIIP KPSEPARQPE SHPEETEEEL REHQALLDEP YLDRLPGQKE AHAQAGVQVK |
| 541 | QEPIESDEEE AEPPREVEPG QRQPSEQELL FRQQALLLEQ QRIHQLRNYQ ASMEAAGIPV |
| 601 | SFGGHRPLSR AQSSPASATF PVSVQEPPTK PRFTTGLVYD TLMLKHQCTC GSSSSHPEHA |
| 661 | GRIQSIWSRL QETGLRGKCE CIRGRKATLE ELQTVHSEAH TLLYGTNPLN RQKLDSKKLL |
| 721 | GSLASVFVRL PCGGVGVDSD TIWNEVHSAG AARLAVGCVV ELVFKVATGE LKNGFAVVRP |
| 781 | PGHHAEESTP MGFCYFNSVA VAAKLLQQRL SVSKILIVDW DVHHGNGTQQ AFYSDPSVLY |
| 841 | MSLHRYDDGN FFPGSGAPDE VGTGPGVGFN VNMAFTGGLD PPMGDAEYLA AFRTVVMPIA |
| 901 | SEFAPDVVLV SSGFDAVEGH PTPLGGYNLS ARCFGYLTKQ LMGLAGGRIV LALEGGHDLT |
| 961 | AICDASEACV SALLGNELDP LPEKVLQQRP NANAVRSMEK VMEIHSKYWR CLQRTTSTAG |
| 1021 | RSLIEAQTCE NEEAETVTAM ASLSVGVKPA EKRPDEEPME EEPPL |

SEQ ID NO: 238
HISTONE DEACETYLASE 4 (HDAC4) ISOFORM X11
XP_006712943.1

| | |
|---|---|
| 1 | MPSTVDVATA LPLQVAPSAV PMDLRLDHQF SLPVAEPALR EQQLQQELLA LKQKQQIQRQ |
| 61 | ILIAEFQRQH EQLSRQHEAQ LHEHIKQQQE MLAMKHQQEL LEHQRKLERH RQEQELEKQH |
| 121 | REQKLQQLKN KEKGKESAVA STEVKMKLQE FVLNKKKALA HRNLNHCISS DPRYWYGKTQ |
| 181 | HSSLDQSSPP QSGVSTSYNH PVLGMYDAKD DFPLRKTASE PNLKLRSRLK QKVAERRSSP |
| 241 | LLRRKDGPVV TALKKRPLDV TDSACSSAPG SGPSSPNNSS GSVSAENGIA PAVPSIPAET |
| 301 | SLAHRLVARE GSAAPLPLYT SPSLPNITLG LPATGPSAGT AGQQDAERLT LPALQQRLSL |
| 361 | FPGTHLTPYL STSPLERDGG AAHSPLLQHM VLLEQPPAQA PLVTDWYLSG LGALPLHAQS |
| 421 | LVGADRVSPS IHKLRQHRPL GRTQSAPLPQ NAQALQHLVI QQQHQQFLEK HKQQFQQQQL |
| 481 | QMNKIIPKPS EPARQPESHP EETEEELREH QALLDEPYLD RLPGQKEAHA QAGVQVKQEP |
| 541 | IESDEEEAEP PREVEPGQRQ PSEQELLFRQ QALLLEQQRI HQLRNYQASM EAAGIPVSFG |
| 601 | GHRPLSRAQS SPASATFPVS VQEPPTKPRF TTGLVYDTLM LKHQCTCGSS SSHPEHAGRI |
| 661 | QSIWSRLQET GLRGKCECIR GRKATLEELQ TVHSEAHTLL YGTNPLNRQK LDSKKLLGSL |
| 721 | ASVFVRLPCG GVGVDSDTIW NEVHSAGAAR LAVGCVVELV FKVATGELKN GFAVVRPPGH |
| 781 | HAEESTPMGF CYFNSVAVAA KLLQQRLSVS KILIVDWDVH HGNGTQQAFY SDPSVLYMSL |
| 841 | HRYDDGNFFP GSGAPDEVGT GPGVGFNVNM AFTGGLDPPM GDAEYLAAFR TVVMPIASEF |
| 901 | APDVVLVSSG FDAVEGHPTP LGGYNLSARC FGYLTKQLMG LAGGRIVLAL EGGHDLTAIC |
| 961 | DASEACVSAL LGNELDPLPE KVLQQRPNAN AVRSMEKVME IHSKYWRCLQ RTTSTAGRSL |
| 1021 | IEAQTCENEE AETVTAMASL SVGVKPAEKR PDEEPMEEEP PL |

SEQ ID NO: 239
RHODOPSIN (RHO)
NP_000530.1

| | |
|---|---|
| 1 | MNGTEGPNFY VPFSNATGVV RSPFEYPQYY LAEPWQFSML AAYMFLLIVL GFPINFLTLY |
| 61 | VTVQHKKLRT PLNYILLNLA VADLFMVLGG FTSTLYTSLH GYFVFGPTGC NLEGFFATLG |
| 121 | GEIALWSLVV LAIERYVVVC KPMSNFRFGE NHAIMGVAFT WVMALACAAP PLAGWSRYIP |
| 181 | EGLQCSCGID YYTLKPEVNN ESFVIYMFVV HFTIPMIIIF FCYGQLVFTV KEAAAQQQES |
| 241 | ATTQKAEKEV TRMVIIMVIA FLICWVPYAS VAFYIFTHQG SNFGPIFMTI PAFFAKSAAI |
| 301 | YNPVIYIMMN KQFRNCMLTT ICCGKNPLGD DEASATVSKT ETSQVAPA |

SEQ ID NO: 240
NERVE GROWTH FACTOR (NGF)
CAA37703.1

| | |
|---|---|
| 1 | MSILFYVIFL AYLRGIQGNN MDQRSLPEDS LNSLIIKLIQ ADILKNKLSK QMVDVKENYQ |
| 61 | STLPKAEAPR EPERGGPAKS AFQPVIAMDT ELLRQQRRYN SPRVLLSDST PLEPPPLYLM |
| 121 | EDYVGSPVVA NRTSRRKRYA EHKSHRGEYS VCDSESLWVT DKSSAIDIRG HQVTVLGEIK |
| 181 | TGNSPVKQYF YETRCKEARP VKNGCRGIDD KHWNSQCKTS QTYVRALTSE NNKLVGWRWI |
| 241 | RIDTSCVCAL SRKIGRT |

SEQ ID NO: 241
NUCLEAR FACTOR, ERYTHROID 2 LIKE 2 (NRF2)
AAB32188.1

| | |
|---|---|
| 1 | MDLIDILWRQ DIDLGVSREV FDFSQRRKEY ELEKQKKLEK ERQEQLQKEQ EKAFFTQLQL |
| 61 | DEETGEFLPI QPAQHTQSET SGSANYSQVA HIPKSDALYF DDCMQLLAQT FPFVDDNEVS |
| 121 | SATFQSLVPD IPGHIESPVF IATNQAQSPE TSVAQVAPVD LDGMQQDIEQ VWEELLSIPE |
| 181 | LQCLNIENDK LVETTMVPSP EAKLTEVDNY HFYSSIPSME KEVGNCSPHF LNAFEDSFSS |
| 241 | ILSTEDPNQL TVNSLNSDAT VNTDFGDEFY SAFIAEPSIS NSMPSPATLS HSLSELLNGP |
| 301 | IDVSDLSLCK AFNQNHPEST AEFNDSDSGI SLNTSPSVAS PEHSVESSSY GDTLLGLSDS |
| 361 | EVEELDSAPG SVKQNGPKTP VHSSGDMVQP LSPSQGQSTH VHDAQCENTP EKELPVSPGH |
| 421 | RKTPFTKDKH SSRLEAHLTR DELRAKALHI PFPVEKIINL PVVDFNEMMS KEQFNEAQLA |
| 481 | LIRDIRRRGK NKVAAQNCRK RKLENIVELE QDLDHLKDEK EKLLKEKGEN DKSLHLLKKQ |
| 541 | LSTLYLEVFS MLRDEDGKPY SPSEYSLQQT RDGNVFLVPK SKKPDVKKN |

SEQ ID NO: 242
GLUTATHIONE S-TRANSFERASE PI 1 (GSTP1)
AAH10915.1

| | |
|---|---|
| 1 | MPPYTVVYFP VRGRCAALRM LLADQGQSWK EEVVTVETWQ EGSLKASCLY GQLPKFQDGD |
| 61 | LTLYQSNTIL RHLGRTLGLY GKDQQEAALV DMVNDGVEDL RCKYVSLIYT NYEAGKDDYV |
| 121 | KALPGQLKPF ETLLSQNQGG KTFIVGDQIS FADYNLLDLL LIHEVLAPGC LDAFPLLSAY |
| 181 | VGRLSARPKL KAFLASPEYV NLPINGNGKQ |

SEQ ID NO: 243
ROD-DERIVED CONE VIABILITY FACTOR (RDCVF)
NP_612463.1

| | |
|---|---|
| 1 | MASLFSGRIL IRNNSDQDEL DTEAEVSRRL ENRLVLLFFG AGACPQCQAF VPILKDFFVR |
| 61 | LTDEFYVLRA AQLALVYVSQ DSTEEQQDLF LKDMPKKWLF LPFEDDLRRD LGRQFSVERL |
| 121 | PAVVVLKPDG DVLTRDGADE IQRLGTACFA NWQEAAEVLD RNFQLPEDLE DQEPRSLTEC |
| 181 | LRRHKYRVEK AARGGRDPGG GGGEEGGAGG LF |

SEQ ID NO: 244
RETINALDEHYDE BINDING PROTEIN 1 (RLBP1)
EAX02038.1

| | |
|---|---|
| 1 | MSEGVGTFRM VPEEEQELRA QLEQLTTKDH GPVFGPCSQL PRHTLQKAKD ELNEREETRE |
| 61 | EAVRELQEMV QAQAASGEEL AVAVAERVQE KDSGFFLRFI RARKFNVGRA YELLRGYVNF |
| 121 | RLQYPELFDS LSPEAVRCTI EAGYPGVLSS RDKYGRVVML FNIENWQSQE ITFDEILQAY |
| 181 | CFILEKLLEN EETQINGFCI IENFKGFTMQ QAASLRTSDL RKMVDMLQDS FPARFKAIHF |
| 241 | IHQPWYFITT YNVVKPFLKS KLLERVFVHG DDLSGFYQEI DENILPSDFG GTLPKYDGKA |
| 301 | VAEQLFGPQA QAENTAF |

SEQ ID NO: 245
DOUBLE HOMEOBOX 4 (DUX4)
AUA60624.1

| | |
|---|---|
| 1 | MALPTPSDST LPAEARGRGR RRRLVWTPSQ SEALRACFER NPYPGIATRE RLAQAIGIPE |
| 61 | PRVQIWFQNE RSRQLRQHRR ESRPWPGRRG PPEGRRKRTA VTGSQTALLL RAFEKDRFPG |
| 121 | IAAREELARE TGLPESRIQI WFQNRRARHP GQGGRAPAQA GGLCSAAPGG GHPAPSWVAF |
| 181 | AHTGAWGTGL PAPHVPCAPG ALPQGAFVSQ AARAAPALQP SQAAPAEGIS QPAPARGDFA |
| 241 | YAAPAPPDGA LSHPQAPRWP PHPGKSREDR DPQRDGLPGP CAVAQPGPAQ AGPQGQGVLA |
| 301 | PPTSQGSPWW GWGRGPQVAG TAWEPQAGAA PPPQPAPPDA SASARQGQMQ GIPAPSQALQ |
| 361 | EPAPWSALPC GLLLDELLAS PEFLQQAQPL LETEAPGELE ASEEAASLEA PLSEEEYRAL |
| 421 | LEEL |

SEQ ID NO: 246
NLR FAMILY PYRIN DOMAIN CONTAINING 3 (NLRP3)
AAI43360.1

| | |
|---|---|
| 1 | MKMASTRCKL ARYLEDLEDV DLKKFKMHLE DYPPQKGCIP LPRGQTEKAD HVDLATLMID |
| 61 | FNGEEKAWAM AVWIFAAINR RDLYEKAKRD EPKWGSDNAR VSNPTVICQE DSIEEEWMGL |
| 121 | LEYLSRISIC KMKKDYRKKY RKYVRSRFQC IEDRNARLGE SVSLNKRYTR LRLIKEHRSQ |
| 181 | QEREQELLAI GKTKTCESPV SPIKMELLFD PDDEHSEPVH TVVFQGAAGI GKTILARKMM |
| 241 | LDWASGTLYQ DRFDYLFYIH CREVSLVTQR SLGDLIMSCC PDPNPPIHKI VRKPSRILFL |
| 301 | MDGFDELQGA FDEHIGPLCT DWQKAERGDI LLSSLIRKKL LPEASLLITT RPVALEKLQH |
| 361 | LLDHPRHVEI LGFSEAKRKE YFFKYFSDEA QARAAFSLIQ ENEVLFTMCF IPLVCWIVCT |
| 421 | GLKQQMESGK SLAQTSKTTT AVYVFFLSSL LQPRGGSQEH GLCAHLWGLC SLAADGIWNQ |
| 481 | KILFEESDLR NHGLQKADVS AFLRMNLFQK EVDCEKFYSF IHMTFQEFFA AMYYLLEEEK |
| 541 | EGRTNVPGSR LKLPSRDVTV LLENYGKFEK GYLIFVVRFL FGLVNQERTS YLEKKLSCKI |
| 601 | SQQIRLELLK WIEVKAKAKK LQIQPSQLEL FYCLYEMQEE DFVQRAMDYF PKIEINLSTR |
| 661 | MDHMVSSFCI ENCHRVESLS LGFLHNMPKE EEEEEKEGRH LDMVQCVLPS SSHAACSHGL |
| 721 | VNSHLTSSFC RGLFSVLSTS QSLTELDLSD NSLGDPGMRV LCETLQHPGC NIRRLCNQKL |
| 781 | VELDLSDNAL GDFGIRLLCV GLKHLLCNLK KLWLVSCCLT SACCQDLASV LSTSHSLTRL |
| 841 | YVGENALGDS GVAILCEKAK NPQCNLQKLG LVNSGLTSVC CSALSSVLST NQNLTHLYLR |
| 901 | GNTLGDKGIK LLCEGLLHPD CKLQVLELDN CNLTSHCCWD LSTLLTSSQS LRKLSLGNND |
| 961 | LGDLGVMMFC EVLKQQSCLL QNLGLSEMYF NYETKSALET LQEEKPELTV VFEPSW |

SEQ ID NO: 247
SPLEEN ASSOCIATED TYROSINE KINASE (SYK), ISOFORM SYK(S)
NP_001167639.1

| | |
|---|---|
| 1 | MASSGMADSA NHLPFFFGNI TREEAEDYLV QGGMSDGLYL LRQSRNYLGG FALSVAHGRK |
| 61 | AHHYTIEREL NGTYAIAGGR THASPADLCH YHSQESDGLV CLLKKPFNRP QGVQPKTGPF |
| 121 | EDLKENLIRE YVKQTWNLQG QALEQAIISQ KPQLEKLIAT TAHEKMPWFH GKISREESEQ |
| 181 | IVLIGSKTNG KFLIRARDNN GSYALCLLHE GKVLHYRIDK DKTGKLSIPE GKKFDTLWQL |
| 241 | VEHYSYKADG LLRVLTVPCQ KIGTQGNVNF GGRPQLPGSH PASSPAQGNR QESTVSFNPY |
| 301 | EPELAPWAAD KGPQREALPM DTEVYESPYA DPEEIRPKEV YLDRKLLTLE DKELGSGNFG |
| 361 | TVKKGYYQMK KVVKTVAVKI LKNEANDPAL KDELLAEANV MQQLDNPYIV RMIGICEAES |
| 421 | WMLVMEMAEL GPLNKYLQQN RHVKDKNIIE LVHQVSMGMK YLEESNFVHR DLAARNVLLV |
| 481 | TQHYAKISDF GLSKALRADE NYYKAQTHGK WPVKWYAPEC INYYKFSSKS DVWSFGVLMW |
| 541 | EAFSYGQKPY RGMKGSEVTA MLEKGERMGC PAGCPREMYD LMNLCWTYDV ENRPGFAAVE |
| 601 | LRLRNYYYDV VN |

SEQ ID NO: 248
SPLEEN ASSOCIATED TYROSINE KINASE (SYK), ISOFORM SYK(L)
NP_003168.2

| | |
|---|---|
| 1 | MASSGMADSA NHLPFFFGNI TREEAEDYLV QGGMSDGLYL LRQSRNYLGG FALSVAHGRK |
| 61 | AHHYTIEREL NGTYAIAGGR THASPADLCH YHSQESDGLV CLLKKPFNRP QGVQPKTGPF |
| 121 | EDLKENLIRE YVKQTWNLQG QALEQAIISQ KPQLEKLIAT TAHEKMPWFH GKISREESEQ |
| 181 | IVLIGSKTNG KFLIRARDNN GSYALCLLHE GKVLHYRIDK DKTGKLSIPE GKKFDTLWQL |
| 241 | VEHYSYKADG LLRVLTVPCQ KIGTQGNVNF GGRPQLPGSH PATWSAGGII SRIKSYSFPK |
| 301 | PGHRKSSPAQ GNRQESTVSF NPYEPELAPW AADKGPQREA LPMDTEVYES PYADPEEIRP |
| 361 | KEVYLDRKLL TLEDKELGSG NFGTVKKGYY QMKKVVKTVA VKILKNEAND PALKDELLAE |
| 421 | ANVMQQLDNP YIVRMIGICE AESWMLVMEM AELGPLNKYL QQNRHVKDKN IIELVHQVSM |
| 481 | GMKYLEESNF VHRDLAARNV LLVTQHYAKI SDFGLSKALR ADENYYKAQT HGKWPVKWYA |
| 541 | PECINYYKFS SKSDVWSFGV LMWEAFSYGQ KPYRGMKGSE VTAMLEKGER MGCPAGCPRE |
| 601 | MYDLMNLCWT YDVENRPGFA AVELRLRNYY YDVVN |

SEQ ID NO: 249
ADRENOCORTICOTROPIC HORMONE (ACTH), PREPROPROTEIN
NP_000930.1

| | |
|---|---|
| 1 | MPRSCCSRSG ALLLALLLQA SMEVRGWCLE SSQCQDLTTE SNLLECIRAC KPDLSAETPM |
| 61 | FPGNGDEQPL TENPRKYVMG HFRWDRFGRR NSSSSGSSGA GQKREDVSAG EDCGPLPEGG |
| 121 | PEPRSDGAKP GPREGKRSYS MEHFRWGKPV GKKRRPVKVY PNGAEDESAE AFPLEFKREL |
| 181 | TGQRLREGDG PDGPADDGAG AQADLEHSLL VAAEKKDEGP YRMEHFRWGS PPKDKRYGGF |
| 241 | MTSEKSQTPL VTLFKNAIIK NAYKKGE |

SEQ ID NO: 250
CASPASE 1 (CASP1), ISOFORM ALPHA PRECURSOR
NP_001244047.1

| | |
|---|---|
| 1 | MADKVLKEKR KLFIRSMGEG TINGLLDELL QTRVLNKEEM EKVKRENATV MDKTRALIDS |
| 61 | VIPKGAQACQ ICITYICEED SYLAGTLGLS ADQTSGNYLN MQDSQGVLSS FPAPQAVQDN |
| 121 | PAMPTSSGSE GNVKLCSLEE AQRIWKQKSA EIYPIMDKSS RTRLALIICN EEFDSIPRRT |
| 181 | GAEVDITGMT MLLQNLGYSV DVKKNLTASD MTTELEAFAH RPEHKTSDST FLVFMSHGIR |
| 241 | EGICGKKHSE QVPDILQLNA IFNMLNTKNC PSLKDKPKVI IIQACRGDSP GVVWFKDSVG |
| 301 | VSGNLSLPTT EEFEDDAIKK AHIEKDFIAF CSSTPDNVSW RHPTMGSVFI GRLIEHMQEY |
| 361 | ACSCDVEEIF RKVRFSFEQP DGRAQMPTTE RVTLTRCFYL FPGH |

SEQ ID NO: 251
CASPASE 1 (CASP1), ISOFORM BETA PRECURSOR
NP_001244048.1

| | |
|---|---|
| 1 | MADKVLKEKR KLFIRSMGEG TINGLLDELL QTRVLNKEEM EKVKRENATV MDKTRALIDS |
| 61 | VIPKGAQACQ ICITYICEED SYLAGTLGLS AAPQAVQDNP AMPTSSGSEG NVKLCSLEEA |
| 121 | QRIWKQKSAE IYPIMDKSSR TRLALIICNE EFDSIPRRTG AEVDITGMTM LLQNLGYSVD |
| 181 | VKKNLTASDM TTELEAFAHR PEHKTSDSTF LVFMSHGIRE GICGKKHSEQ VPDILQLNAI |
| 241 | FNMLNTKNCP SLKDKPKVII IQACRGDSPG VVWFKDSVGV SGNLSLPTTE EFEDDAIKKA |
| 301 | HIEKDFIAFC SSTPDNVSWR HPTMGSVFIG RLIEHMQEYA CSCDVEEIFR KVRFSFEQPD |
| 361 | GRAQMPTTER VTLTRCFYLF PGH |

SEQ ID NO: 252
CD59
CAG46523.1

| | |
|---|---|
| 1 | MGIQGGSVLF GLLLVLAVFC HSGHSLQCYN CPNPTADCKT AVNCSSDFDA CLITKAGLQV |
| 61 | YNKCWKFEHC NFNDVTTRLR ENELTYYCCK KDLCNFNEQL ENGGTSLSEK TVLLLVTPFL |
| 121 | AAAWSLHP |

SEQ ID NO: 253
NOTCH REGULATED ANKYRIN REPEAT PROTEIN (NRARP)
NP_001004354.1

| | |
|---|---|
| 1 | MSQAELSTCS APQTQRIFQE AVRKGNTQEL QSLLQNMTNC EFNVNSFGPE GQTALHQSVI |
| 61 | DGNLELVKLL VKFGADIRLA NRDGWSALHI AAFGGHQDIV LYLITKAKYA ASGR |

SEQ ID NO: 254
ALPHA-2-ANTIPLASMIN (A2AP), ISOFORM A PRECURSOR
NP_000925.2

| | |
|---|---|
| 1 | MALLWGLLVL SWSCLQGPCS VFSPVSAMEP LGRQLTSGPN QEQVSPLTLL KLGNQEPGGQ |
| 61 | TALKSPPGVC SRDPTPEQTH RLARAMMAFT ADLFSLVAQT STCPNLILSP LSVALALSHL |
| 121 | ALGAQNHTLQ RLQQVLHAGS GPCLPHLLSR LCQDLGPGAF RLAARMYLQK GFPIKEDFLE |
| 181 | QSEQLFGAKP VSLTGKQEDD LANINQWVKE ATEGKIQEFL SGLPEDTVLL LLNAIHFQGF |
| 241 | WRNKFDPSLT QRDSFHLDEQ FTVPVEMMQA RTYPLRWFLL EQPEIQVAHF PFKNNMSFVV |
| 301 | LVPTHFEWNV SQVLANLSWD TLHPPLVWER PTKVRLPKLY LKHQMDLVAT LSQLGLQELF |
| 361 | QAPDLRGISE QSLVVSGVQH QSTLELSEVG VEAAAATSIA MSRMSLSSFS VNRPFLFFIF |
| 421 | EDTTGLPLFV GSVRNPNPSA PRELKEQQDS PGNKDFLQSL KGFPRGDKLF GPDLKLVPPM |
| 481 | EEDYPQFGSP K |

SEQ ID NO: 255
ALPHA-2-ANTIPLASMIN (A2AP), ISOFORM B PRECURSOR
NP_001159393.1

| | |
|---|---|
| 1 | MALLWGLLVL SWSCLQGPCS VFSPVSAMEP LGRQLTSGPN QEQVSPLTLL KLGNQVQPGA |
| 61 | QNHTLQRLQQ VLHAGSGPCL PHLLSRLCQD LGPGAFRLAA RMYLQKGFPI KEDFLEQSEQ |
| 121 | LFGAKPVSLT GKQEDDLANI NQWVKEATEG KIQEFLSGLP EDTVLLLLNA IHFQGFWRNK |
| 181 | FDPSLTQRDS FHLDEQFTVP VEMMQARTYP LRWFLLEQPE IQVAHFPFKN NMSFVVLVPT |
| 241 | HFEWNVSQVL ANLSWDTLHP PLVWERPTKV RLPKLYLKHQ MDLVATLSQL GLQELFQAPD |
| 301 | LRGISEQSLV VSGVQHQSTL ELSEVGVEAA AATSIAMSRM SLSSFSVNRP FLFFIFEDTT |
| 361 | GLPLFVGSVR NPNPSAPREL KEQQDSPGNK DFLQSLKGFP RGDKLFGPDL KLVPPMEEDY |
| 421 | PQFGSPK |

SEQ ID NO: 256
PLASMINOGEN (PLG)
AAA60113.1

| | |
|---|---|
| 1 | MEHKEVVLLL LLFLKSGQGE PLDDYVNTQG ASLFSVTKKQ LGAGSIEECA AKCEEDEEFT |
| 61 | CRAFQYHSKE QQCVIMAENR KSSIIIRMRD VVLFEKKVYL SECKTGNGKN YRGTMSKTKN |
| 121 | GITCQKWSST SPHRPRFSPA THPSEGLEEN YCRNPDNDPQ GPWCYTTDPE KRYDYCDILE |
| 181 | CEEECMHCSG ENYDGKISKT MSGLECQAWD SQSPHAHGYI PSKFPNKNLK KNYCRNPDRE |
| 241 | LRPWCFTTDP NKRWELCDIP RCTTPPPSSG PTYQCLKGTG ENYRGNVAVT VSGHTCQHWS |
| 301 | AQTPHTHNRT PENFPCKNLD ENYCRNPDGK RAPWCHTTNS QVRWEYCKIP SCDSSPVSTE |
| 361 | QLAPTAPPEL TPVVQDCYHG DGQSYRGTSS TTTTGKKCQS WSSMTPHRHQ KTPENYPNAG |
| 421 | LTMNYCRNPD ADKGPWCFTT DPSVRWEYCN LKKCSGTEAS VVAPPPVVLL PNVETPSEED |
| 481 | CMFGNGKGYR GKRATTVTGT PCQDWAAQEP HRHSIFTPET NPRAGLEKNY CRNPDGDVGG |
| 541 | PWCYTTNPRK LYDYCDVPQC AAPSFDCGKP QVEPKKCPGR VVGGCVAHPH SWPWQVSLRT |
| 601 | RFGMHFCGGT LISPEWVLTA AHCLEKSPRP SSYKVILGAH QEVNLEPHVQ EIEVSRLFLE |
| 661 | PTRKDIALLK LSSPAVITDK VIPACLPSPN YVVADRTECF ITGWGETQGT FGAGLLKEAQ |
| 721 | LPVIENKVCN RYEFLNGRVQ STELCAGHLA GGTDSCQGDS GGPLVCFEKD KYILQGVTSW |
| 781 | GLGCARPNKP GVYVRVSRFV TWIEGVMRNN |

SEQ ID NO: 257
GROWTH HORMONE
AAA98618.1

| | |
|---|---|
| 1 | MATGSRTSLL LAFGLLCLPW LQEGSAFPTI PLSRLFDNAM LRAHRLHQLA FDTYQEFEEA |
| 61 | YIPKEQKYSF LQNPQTSLCF SESIPTPSNR EETQQKSNLE LLRISLLLIQ SWLEPVQFLR |
| 121 | SVFANSLVYG ASDSNVYDLL KDLEEGIQTL MGRLEDGSPR TGQIFKQTYS KFDTNSHNDD |
| 181 | ALLKNYGLLY CFRKDMDKVE TFLRIVQCRS VEGSCGF |

SEQ ID NO: 258
INSULIN LIKE GROWTH FACTOR 1 (IGF1)
CAG46659.1

| | |
|---|---|
| 1 | MGKISSLPTQ LFKCCFCDFL KVKMHTMSSS HLFYLALCLL TFTSSATAGP ETLCGAELVD |
| 61 | ALQFVCGDRG FYFNKPTGYG SSSRRAPQTG IVDECCFRSC DLRRLEMYCA PLKPAKSARS |
| 121 | VRAQRHTDMP KTQKEVHLKN ASRGSAGNKN YRM |

SEQ ID NO: 259
INTERLEUKIN 1 BETA (IL1B)
AAA74137.1

| | |
|---|---|
| 1 | MAEVPELASE MMAYYSGNED DLFFEADGPK QMKCSFQDLD LCPLDGGIQL RISDHHYSKG |
| 61 | FRQAASVVVA MDKLRKMLVP CPQTFQENDL STFFPFIFEE EPIFFDTWDN EAYVHDAPVR |
| 121 | SLNCTLRDSQ QKSLVMSGPY ELKALHLQGQ DMEQQVVFSM SFVQGEESND KIPVALGLKE |
| 181 | KNLYLSCVLK DDKPTLQLES VDPKNYPKKK MEKRFVFNKI EINNKLEFES AQFPNWYIST |
| 241 | SQAENMPVFL GGTKGGQDIT DFTMQFVSS |

SEQ ID NO: 260
ANGIOTENSIN I CONVERTING ENZYME 2 (ACE2)
ACT66268.1

| | |
|---|---|
| 1 | MSSSSWLLLS LVAVTAAQST IEEQAKTFLD KFNHEAEDLF YQSSLASWNY NTNITEENVQ |
| 61 | NMNNAGDKWS AFLKEQSTLA QMYPLQEIQN LTVKLQLQAL QQNGSSVLSE DKSKRLNTIL |
| 121 | NTMSTIYSTG KVCNPDNPQE CLLLEPGLNE IMANSLDYNE RLWAWESWRS EVGKQLRPLY |
| 181 | EEYVVLKNEM ARANHYEDYG DYWRGDYEVN GVDGYDYSRG QLIEDVEHTF EEIKPLYEHL |
| 241 | HAYVRAKLMN AYPSYISPIG CLPAHLLGDM WGRFWTNLYS LTVPFGQKPN IDVTDAMVDQ |
| 301 | AWDAQRIFKE AEKFFVSVGL PNMTQGFWEN SMLTDPGNVQ KAVCHPTAWD LGKGDFRILM |
| 361 | CTKVTMDDFL TAHHEMGHIQ YDMAYAAQPF LLRNGANEGF HEAVGEIMSL SAATPKHLKS |
| 421 | IGLLSPDFQE DNETEINFLL KQALTIVGTL PFTYMLEKWR WMVFKGEIPK DQWMKKWWEM |
| 481 | KREIVGVVEP VPHDETYCDP ASLFHVSNDY SFIRYYTRTL YQFQFQEALC QAAKHEGPLH |
| 541 | KCDISNSTEA GQKLFNMLRL GKSEPWTLAL ENVVGAKNMN VRPLLNYFEP LFTWLKDQNK |
| 601 | NSFVGWSTDW SPYADQSIKV RISLKSALGD KAYEWNDNEM YLFRSSVAYA MRQYFLKVKN |
| 661 | QMILFGEEDV RVANLKPRIS FNFFVTAPKN VSDIIPRTEV EKAIRMSRSR INDAFRLNDN |
| 721 | SLEFLGIQPT LGPPNQPPVS IWLIVFGVVM GVIVVGIVIL IFTGIRDRKK KNKARSGENP |
| 781 | YASIDISKGE NNPGFQNTDD VQTSF |

SEQ ID NO: 261
INTEGRIN ALPHA SUBUNIT PRECURSOR
AAA51620.1

| | |
|---|---|
| 1 | MTRTRAALLL FTALATSLGF NLDTEELTAF RVDSAGFGDS VVQYANSWVV VGAPQKITAA |
| 61 | NQTGGLYQCG YSTGACEPIG LQVPPEAVNM SLGLSLASTT SPSQLLACGP TVHHECGRNM |
| 121 | YLTGLCFLLG PTQLTQRLPV SRQECPRQEQ DIVFLIDGSG SISSRNFATM MNFVRAVISQ |
| 181 | FQRPSTQFSL MQFSNKFQTH LTFEEFRRTS NPLSLLASVH QLQGFTYTAT AIQNVVHRLF |
| 241 | HASYGARRDA TKILIVITDG KKEGDTLDYK DVIPMADAAG IIRYAIGVGL AFQNRNSWKE |
| 301 | LNDIASKPSQ EHIFKVEDFD ALKDIQTQLR EKIFPIEGTE TTSSSSFELE MAQEGFSAVF |
| 361 | TPDGPVLGAV GSFTWSGGAF LYPPNMSPTF INMSQENVDM RDSYLGYSTE LALWKGVQSL |
| 421 | VLGAPRYQHT GKAVIFTQVS RQWRMKAEVT GTQIGSYFGP SLCSVDVDSD GSTDLVLIGP |
| 481 | PHYYEQTRGA QVSVCPLPRG WRRWWCDAVL YGEQGHPWGR FGAALTVLGD VNGDKLTDVV |
| 541 | IGAPGEEENR GAVYLFHGVL GPSISPSHSQ RIAGSQLSSR LQYFGQALSG GQDLTQDGLV |
| 601 | DLAVGARGQV LLLRTRPVLW VGVSMQFIPA EIPRSAFECR EQVVSEQTLV QSNICLYIDK |
| 661 | RSKNLLGSRD LQSSVTLDLA LDPGRLSPRA TFQETKNRSL SRVRVLGLKA HCENFNLLLP |
| 721 | SCVEDSVTPI TLRLNFTLVG KPLLAFRNLR PMLAADAQRY FTASLPFEKN CGADHICQDN |
| 781 | LGISFSFPGL KSLLVGSNLE LNAEVMVWND GEDSYGTTIT FSHPAGLSYR YVAEGQKQGQ |
| 841 | LRSLHLTCDS APVGSQGTWS TSCRINHLIF RGGAQITFLA TFDVSPKAVL GDRLLLTANV |
| 901 | SSENNTPRTS KTTFQLELPV KYAVYTVVSS HEQFTKYLNF SESEEKESHV AMHRYQVNNL |
| 961 | GQRDLPVSIN FWVPVELNQE AVWMDVEVSL PQNPSLRCSS EKIAGPASDF LAHIQKNPVL |
| 1021 | DCSIAGCLRF RCDVPSFSVQ EELDFTLKGN LSFGWVRQIL QKKVSVVSVA EITFDTSVYS |
| 1081 | QLPGQEAFMR AQTTTVLEKY KVHNPTPLIV GSSIGGLLLL ALITAVLYKV GFFKRQYKEM |
| 1141 | MEEANGQIAP ENGTQTPSPP SEK |

SEQ ID NO: 262
INTEGRIN ALPHA SUBUNIT PRECURSOR
P05556.2

| | |
|---|---|
| 1 | MNLQPIFWIG LISSVCCVFA QTDENRCLKA NAKSCGECIQ AGPNCGWCTN STFLQEGMPT |
| 61 | SARCDDLEAL KKKGCPPDDI ENPRGSKDIK KNKNVTNRSK GTAEKLKPED ITQIQPQQLV |
| 121 | LRLRSGEPQT FTLKFKRAED YPIDLYYLMD LSYSMKDDLE NVKSLGTDLM NEMRRITSDF |
| 181 | RIGFGSFVEK TVMPYISTTP AKLRNPCTSE QNCTSPFSYK NVLSLTNKGE VFNELVGKQR |
| 241 | ISGNLDSPEG GFDAIMQVAV CGSLIGWRNV TRLLVFSTDA GFHFAGDGKL GGIVLPNDGQ |
| 301 | CHLENNMYTM SHYYDYPSIA HLVQKLSENN IQTIFAVTEE FQPVYKELKN LIPKSAVGTL |
| 361 | SANSSNVIQL IIDAYNSLSS EVILENGKLS EGVTISYKSY CKNGVNGTGE NGRKCSNISI |
| 421 | GDEVQFEISI TSNKCPKKDS DSFKIRPLGF TEEVEVILQY ICECECQSEG IPESPKCHEG |
| 481 | NGTFECGACR CNEGRVGRHC ECSTDEVNSE DMDAYCRKEN SSEICSNNGE CVCGQCVCRK |
| 541 | RDNTNEIYSG KFCECDNFNC DRSNGLICGG NGVCKCRVCE CNPNYTGSAC DCSLDTSTCE |
| 601 | ASNGQICNGR GICECGVCKC TDPKFQGQTC EMCQTCLGVC AEHKECVQCR AFNKGEKKDT |
| 661 | CTQECSYFNI TKVESRDKLP QPVQPDPVSH CKEKDVDDCW FYFTYSVNGN NEVMVHVVEN |
| 721 | PECPTGPDII PIVAGVVAGI VLIGLALLLI WKLLMIIHDR REFAKFEKEK MNAKWDTGEN |
| 781 | PIYKSAVTTV VNPKYEGK |

SEQ ID NO: 263
CD40
AAH64518.1

| | |
|---|---|
| 1 | MVRLPLQCVL WGCLLTAVHP EPPTACREKQ YLINSQCCSL CQPGQKLVSD CTEFTETECL |
| 61 | PCGESEFLDT WNRETHFHQH KYCDPNLGLR VQQKGTSETD TICTCEEGWH CTSEACESCV |
| 121 | LHRSCSPGFG VKQIDICQPH FPKDRGLNLL M |

SEQ ID NO: 264
INSULIN-LIKE GROWTH FACTOR 1 RECEPTOR (IGF1R)
AAI43722.1

| | |
|---|---|
| 1 | MKSGSGGGSP TSLWGLLFLS AALSLWPTSG EICGPGIDIR NDYQQLKRLE NCTVIEGYLH |
| 61 | ILLISKAEDY RSYRFPKLTV ITEYLLLFRV AGLESLGDLF PNLTVIRGWK LFYNYALVIF |
| 121 | EMTNLKDIGL YNLRNITRGA IRIEKNADLC YLSTVDWSLI LDAVSNNYIV GNKPPKECGD |
| 181 | LCPGTMEEKP MCEKTTINNE YNYRCWTTNR CQKMCPSTCG KRACTENNEC CHPECLGSCS |
| 241 | APDNDTACVA CRHYYYAGVC VPACPPNTYR FEGWRCVDRD FCANILSAES SDSEGFVIHD |
| 301 | GECMQECPSG FIRNGSQSMY CIPCEGPCPK VCEEEKKTKT IDSVTSAQML QGCTIFKGNL |
| 361 | LINIRRGNNI ASELENFMGL IEVVTGYVKI RHSHALVSLS FLKNLRLILG EEQLEGNYSF |
| 421 | YVLDNQNLQQ LWDWDHRNLT IKAGKMYFAF NPKLCVSEIY RMEEVTGTKG RQSKGDINTR |
| 481 | NNGERASCES DVLHFTSTTT SKNRIIITWH RYRPPDYRDL ISFTVYYKEA PFKNVTEYDG |
| 541 | QDACGSNSWN MVDVDLPPNK DVEPGILLHG LKPWTQYAVY VKAVTLTMVE NDHIRGAKSE |
| 601 | ILYIRTNASV PSIPLDVLSA SNSSSQLIVK WNPPSLPNGN LSYYIVRWQR QPQDGYLYRH |
| 661 | NYCSKDKIPI RKYADGTIDI EEVTENPKTE VCGGEKGPCC ACPKTEAEKQ AEKEEAEYRK |
| 721 | VFENFLHNSI FVPRPERKRR DVMQVANTTM SSRSRNTTAA DTYNITDPEE LETEYPFFES |
| 781 | RVDNKERTVI SNLRPFTLYR IDIHSCNHEA EKLGCSASNF VFARTMPAEG ADDIPGPVTW |
| 841 | EPRPENSIFL KWPEPENPNG LILMYEIKYG SQVEDQRECV SRQEYRKYGG AKLNRLNPGN |
| 901 | YTARIQATSL SGNGSWTDPV FFYVQAKRYE NFIHLIIALP VAVLLIVGGL VIMLYVFHRK |
| 961 | RNNSRLGNGV LYASVNPEYF SAADVYVPDE WEVAREKITM SRELGQGSFG MVYEGVAKGV |
| 1021 | VKDEPETRVA IKTVNEAASM RERIEFLNEA SVMKEFNCHH VVRLLGVVSQ GQPTLVIMEL |
| 1081 | MTRGDLKSYL RSLRPEMENN PVLAPPSLSK MIQMAGEIAD GMAYLNANKF VHRDLAARNC |
| 1141 | MVAEDFTVKI GDFGMTRDIY ETDYYRKGGK GLLPVRWMSP ESLKDGVFTT YSDVWSFGVV |
| 1201 | LWEIATLAEQ PYQGLSNEQV LRFVMEGGLL DKPDNCPDML FELMRMCWQY NPKMRPSFLE |
| 1261 | IISSIKEEME PGFREVSFYY SEENKLPEPE ELDLEPENME SVPLDPSASS SSLPLPDRHS |
| 1321 | GHKAENGPGP GVLVLRASFD ERQPYAHMNG GRKNERALPL PQSSTC |

SEQ ID NO: 265
INSULIN-LIKE GROWTH FACTOR 2 RECEPTOR (IGF2R)
AAK56918.1

| | |
|---|---|
| 1 | MGAAAGRSPH LGPAPARRPQ RSLLLLQLLL LVAAPGSTQA QAAPFPELCS YTWEAVDTKN |
| 61 | NVLYKINICG SVDIVQCGPS SAVCMHDLKT RTYHSVGDSV LRSATRSLLE FNTTVSCDQQ |
| 121 | GTNHRVQSSI AFLCGKTLGT PEFVTATECV HYFEWRTTAA CKKDIFKANK EVPCYVFDEE |
| 181 | LRKHDLNPLI KLSGAYLVDD SDPDTSLFIN VCRDIDTLRD PGSQLRACPP GTAACLVRGH |
| 241 | QAFDVGQPRD GLKLVRKDRL VLSYVREEAG KLDFCDGHSP AVTITFVCPS ERREGTIPKL |
| 301 | TAKSNCRYEI EWITEYACHR DYLESKTCSL SGEQQDVSID LTPLAQSGGS SYISDGKEYL |
| 361 | FYLNVCGETE IQFCNKKQAA VCQVKKSDTS QVKAAGRYHN QTLRYSDGDL TLIYFGGDEC |
| 421 | SSGFQRMSVI NFECNKTAGN DGKGTPVFTG EVDCTYFFTW DTEYACVKEK EDLLCGATDG |
| 481 | KKRYDLSALV RHAEPEQNWE AVDGSQTETE KKHFFINICH RVLQEGKARG CPEDAAVCAV |
| 541 | DKNGSKNLGK FISSPMKEKG NIQLSYSDGD DCGHGKKIKT NITLVCKPGD LESAPVLRTS |
| 601 | GEGGCFYEFE WHTAAACVLS KTEGENCTVF DSQAGFSFDL SPLTKKNGAY KVETKKYDFY |
| 661 | INVCGPVSVS PCQPDSGACQ VAKSDEKTWN LGLSNAKLSY YDGMIQLNYR GGTPYNNERH |
| 721 | TPRATLITFL CDRDAGVGFP EYQEEDNSTY NFRWYTSYAC PEEPLECVVT DPSTLEQYDL |
| 781 | SSLAKSEGGL GGNWYAMDNS GEHVTWRKYY INVCRPLNPV PGCNRYASAC QMKYEKDQGS |
| 841 | FTEVVSISNL GMAKTGPVVE DSGSLLLEYV NGSACTTSDG RQTTYTTRIH LVCSRGRLNS |
| 901 | HPIFSLNWEC VVSFLWNTEA ACPIQTTTDT DQACSIRDPN SGFVFNLNPL NSSQGYNVSG |
| 961 | IGKIFMFNVC GTMPVCGTIL GKPASGCEAE TQTEELKNWK PARPVGIEKS LQLSTEGFIT |
| 1021 | LTYKGPLSAK GTADAFIVRF VCNDDVYSGP LKFLHQDIDS GQGIRNTYFE FETALACVPS |
| 1081 | PVDCQVTDLA GNEYDLTGLS TVRKPWTAVD TSVDGRKRTF YLSVCNPLPY IPGCQGSAVG |
| 1141 | SCLVSEGNSW NLGVVQMSPQ AAANGSLSIM YVNGDKCGNQ RFSTRITFEC AQISGSPAFQ |
| 1201 | LQDGCEYVFI WRTVEACPVV RVEGDNCEVK DPRHGNLYDL KPLGLNDTIV SAGEYTYYFR |
| 1261 | VCGKLSSDVC PTSDKSKVVS SCQEKREPQG FHKVAGLLTQ KLTYENGLLK MNFTGGDTCH |
| 1321 | KVYQRSTAIF FYCDRGTQRP VFLKETSDCS YLFEWRTQYA CPPFDLTECS FKDGAGNSFD |
| 1381 | LSSLSRYSDN WEAITGTGDP EHYLINVCKS LAPQAGTEPC PPEAAACLLG GSKPVNLGRV |
| 1441 | RDGPQWRDGI IVLKYVDGDL CPDGIRKKST TIRFTCSESQ VNSRPMFISA VEDCEYTFAW |
| 1501 | PTATACPMKS NEHDDCQVTN PSTGHLFDLS SLSGRAGFTA AYSEKGLVYM SICGENENCP |
| 1561 | PGVGACFGQT RISVGKANKR LRYVDQVLQL VYKDGSPCPS KSGLSYKSVI SFVCRPEARP |
| 1621 | TNRPMLISLD KQTCTLFFSW HTPLACEQAT ECSVRNGSSI VDLSPLIHRT GGYEAYDESE |
| 1681 | DDASDTNPDF YINICQPLNP MHGVPCPAGA AVCKVPIDGP PIDIGRVAGP PILNPIANEI |
| 1741 | YLNFESSTPC LADKHFNYTS LIAFHCKRGV SMGTPKLLRT SECDFVFEWE TPVVCPDEVR |
| 1801 | MDGCTLTDEQ LLYSFNLSSL STSTFKVTRD SRTYSVGVCT FAVGPEQGGC KDGGVCLLSG |
| 1861 | TKGASFGRLQ SMKLDYRHQD EAVVLSYVNG DRCPPETDDG VPCVFPFIFN GKSYEECIIE |
| 1921 | SRAKLWCSTT ADYDRDHEWG FCRHSNSYRT SSIIFKCDED EDIGRPQVFS EVRGCDVTFE |
| 1981 | WKTKVVCPPK KLECKFVQKH KTYDLRLLSS LTGSWSLVHN GVSYYINLCQ KIYKGPLGCS |
| 2041 | ERASICRRTT TGDVQVLGLV HTQKLGVIGD KVVVTYSKGY PCGGNKTASS VIELTCTKTV |
| 2101 | GRPAFKRFDI DSCTYYFSWD SRAACAVKPQ EVQMVNGTIT NPINGKSFSL GDIYFKLFRA |
| 2161 | SGDMRTNGDN YLYEIQLSSI TSSRNPACSG ANICQVKPND QHFSRKVGTS DKTKYYLQDG |
| 2221 | DLDVVFASSS KCGKDKTKSV SSTIFFHCDP LVEDGIPEFS HETADCQYLF SWYTSAVCPL |
| 2281 | GVGFDSENPG DDGQMHKGLS ERSQAVGAVL SLLLVALTCC LLALLLYKKE RRETVISKLT |
| 2341 | TCCRRSSNVS YKYSKVNKEE ETDENETEWL MEEIQLPPPR QGKEGQENGH ITTKSVKALS |
| 2401 | SLHGDDQDSE DEVLTIPEVK VHSGRGAGAE SSHPVRNAQS NALQEREDDR VGLVRGEKAR |
| 2461 | KGKSSSAQQK TVSSTKLVSF HDDSDEDLLH I |

SEQ ID NO: 266
RT P801
AAL38424.1

| | |
|---|---|
| 1 | MPSLWDRFSS SSTSSSPSSL PRTPTPDRPP RSAWGSATRE EGFDRSTSLE SSDCESLDSS |
| 61 | NSGFGPEEDT AYLDGVSLPD FELLSDPEDE HLCANLMQLL QESLAQARLG SRRPARLLMP |
| 121 | SQLVSQVGKE LLRLAYSEPC GLRGALLDVC VEQGKSCHSV GQLALDPSLV PTFQLTLVLR |
| 181 | LDSRLWPKIQ GLFSSANSPF LPGFSQSLTL STGFRVIKKK LYSSEQLLIE EC |

SEQ ID NO: 267
METALLOPROTEINASE 2 (MMP2)
BAA12023

| | |
|---|---|
| 1 | MILLTFSTGR RLDFVHHSGV FFLQTLLWIL CATVCGTEQY FNVEVWLQKY GYLPPTDPRM |
| 61 | SVLRSAETMQ SALAAMQQFY GINMTGKVDR NTIDWMKKPR CGVPDQTRGS SKFHIRRKRY |
| 121 | ALTGQKWQHK HITYSIKNVT PKVGDPETRK AIRRAFDVWQ NVTPLTFEEV PYSELENGKR |
| 181 | DVDITIIFAS GFHGDSSPFD GEGGFLAHAY FPGPGIGGDT HFDSDEPWTL GNPNHDGNDL |
| 241 | FLVAVHELGH ALGLEHSNDP TAIMAPFYQY METDNFKLPN DDLQGIQKIY GPPDKIPPPT |
| 301 | RPLPTVPPHR SIPPADPRKN DRPKPPRPPT GRPSYPGAKP NICDGNFNTL AILRREMFVF |
| 361 | KDQWFWRVRN NRVMDGYPMQ ITYFWRGLPP SIDAVYENSD GNFVFFKVKG DTLSVIQDGW |
| 421 | LYKYHWKWIL EQRQSVPVLS RQTEKHKTYE ELSSITY |

SEQ ID NO: 268
G-PROTEIN COUPLED RECEPTOR 143 (GPR143)
NP_000264

| | |
|---|---|
| 1 | MASPRLGTFC CPTRDAATQL VLSFQPRAFH ALCLGSGGLR LALGLLQLLP GRRPAGPGSP |
| 61 | ATSPPASVRI LRAAAACDLL GCLGMVIRST VWLGFPNFVD SVSDMNHTEI WPAAFCVGSA |
| 121 | MWIQLLYSAC FWWLFCYAVD AYLVIRRSAG LSTILLYHIM AWGLATLLCV EGAAMLYYPS |
| 181 | VSRCERGLDH AIPHYVTMYL PLLLVLVANP ILFQKTVTAV ASLLKGRQGI YTENERRMGA |
| 241 | VIKIRFFKIM LVLIICWLSN IINESLLFYL EMQTDINGGS LKPVRTAAKT TWFIMGILNP |
| 301 | AQGFLLSLAF YGWTGCSLGF QSPRKEIQWE SLTTSAAEGA HPSPLMPHEN PASGKVSQVG |
| 361 | GQTSDEALSM LSEGSDASTI EIHTASESCN KNEGDPALPT HGDL |

SEQ ID NO: 269
G-PROTEIN COUPLED RECEPTOR 143 (GPR143)
EAW98773.1

| | |
|---|---|
| 1 | MTQAGRRGPG TPEPRPRTQP MASPRLGTFC CPTRDAATQL VLSFQPRAFH ALCLGSGGLR |
| 61 | LALGLLQLLP GRRPAGPGSP ATSPPASVRI LRAAAACDLL GCLGMVIRST VWLGFPNFVD |
| 121 | SVSDMNHTEI WPAAFCVGSA MWIQLLYSAC FWWLFCYAVD AYLVIRRSAG LSTILLYHIM |
| 181 | AWGLATLLCV EGAAMLYYPS VSRCERGLDH AIPHYVTMYL PLLLVLVANP ILFQKTVTAV |
| 241 | ASLLKGRQGI YTENERRMGA VIKIRFFKIM LVLIICWLSN IINESLLFYL EMQTDINGGS |
| 301 | LKPVRTAAKT TWFIMGILNP AQGFLLSLAF YGWTGCSLGF QSPRKEIQWE SLTTSAAEGA |
| 361 | HPSPLMPHEN PASGKVSQVG GQTSDEALSM LSEGSDASTI EIHTASESCN KNEGDPALPT |
| 421 | HGDL |

SEQ ID NO: 270
TYROSINASE (TYR)
AAB60319.1

| | |
|---|---|
| 1 | MLLAVLYCLL WSFQTSAGHF PRACVSSKNL MEKECCPPWS GDRSPCGQLS GRGSCQNILL |
| 61 | SNAPLGPQFP FTGVDDRESW PSVFYNRTCQ CSGNFMGFNC GNCKFGFWGP NCTERRLLVR |
| 121 | RNIFDLSAPE KDKFFAYLTL AKHTISSDYV IPIGTYGQMK NGSTPMFNDI NIYDLFVWMH |
| 181 | YYVSMDALLG GSEIWRDIDF AHEAPAFLPW HRLFLLRWEQ EIQKLTGDEN FTIPYWDWRD |
| 241 | AEKCDICTDE YMGGQHPTNP NLLSPASFFS SWQIVCSRLE EYNSHQSLCN GTPEGPLRRN |
| 301 | PGNHDKSRTP RLPSSADVEF CLSLTQYESG SMDKAANFSF RNTLEGFASP LTGIADASQS |
| 361 | SMHNALHIYM NGTMSQVQGS ANDPIFLLHH AFVDSIFEQW LQRHRPLQEV YPEANAPIGH |
| 421 | NRESYMVPFI PLYRNGDFFI SSKDLGYDYS YLQDSDPDSF QDYIKSYLEQ ASRIWSWLLG |
| 481 | AAMVGAVLTA LLAGLVSLLC RHKRKQLPEE KQPLLMEKED YHSLYQSHL |

SEQ ID NO: 271
CASPASE 2 (CASP2)
CAG46548.1

| | |
|---|---|
| 1 | MHPHHQETLK KNRVVLAKQL LLSELLEHLL EKDIITLEMR ELIQAKVGSF SQNVELLNLL |
| 61 | PKRGPQAFDA FCEALRETKQ GHLEDMLLTT LSGLQHVLPP LSCDYDLSLP FPVCESCPLY |
| 121 | KKLRLSTDTV EHSLDNKDGP VCLQVKPCTP EFYQTHFQLA YRLQSRPRGL ALVLSNVHFT |
| 181 | GEKELEFRSG GDVDHSTLVT LFKLLGYDVH VLCDQTAQEM QEKLQNFAQL PAHRVTDSCI |
| 241 | VALLSHGVEG AIYGVDGKLL QLQEVFQLFD NANCPSLQNK PKMFFIQACR GGAIGSLGHL |
| 301 | LLFTAATASL AL |

SEQ ID NO: 272
LEUCINE RICH REPEAT AND IG DOMAIN CONTAINING PROTEIN 1 (LINGO1)
AAH68558.1

| | |
|---|---|
| 1 | MLAGGVRSMP SPLLACWQPI LLLVLGSVLS GSATGCPPRY ECSAQDRAVL CHRKRFVAVP |
| 61 | EGIPTETRLL DLGKNRIKTL NQDEFASFPH LEELELNENI VSAVEPGAFN NLFNLRTLGL |
| 121 | RSNRLKLIPL GVFTGLSNLT KLDISENKIV ILLDYMFQDL YNLRSLEVGD NDLVYISHRA |
| 181 | FSGLNSLEQL TLEKCNLTSI PTEALSHLHG LIVLRLRHLN INAIRDYSFK RLYRLKVLEI |
| 241 | SHWPYLDTMT PNCLYGLNLT SLSITHCNLT AVPYLAVRHL VYLRFLNLSY NRISTIEGSM |
| 301 | LHELLRLQEI QLVGGQLAVV EPYAFRGLNY LRVLNVSGNQ LTTLEESVFH SVGNLETLIL |
| 361 | DSNPLACDCR LLWVFRRRWR LNFNRQQPTC ATPEFVQGKE FKDFPDVLLP NYFTCRRARI |
| 421 | RDRKAQQVFV DEGHTVQFVC RADGDPPPAI LWLSPRKHLV SAKSNGRLTV FPDGTLEVRY |
| 481 | AQVQDNGTYL CIAANAGGND SMPAHLHVRS YSPDWPHQPN KTFAFISNQP GEGEANSTRA |
| 541 | TVPFPFDIKT LIIATTMGFI SFLGVVLFCL VLLFLWSRGK GNTKHNIEIE YVPRKSDAGI |
| 601 | SSADAPRKFN MKMI |

SEQ ID NO: 273
PALMITOYL-PROTEIN THIOESTERASE 1 (PPT1)
AAH08426.1

| | |
|---|---|
| 1 | MASPGCLWLL AVALLPWTCA SRALQHLDPP APLPLVIWHG MGDSCCNPLS MGAIKKMVEK |
| 61 | KIPGIYVLSL EIGKTLMEDV ENSFFLNVNS QVTTVCQALA KDPKLQQGYN AMGFSQGGQF |
| 121 | LRAVAQRCPS PPMINLISVG GQHQGVFGLP RCPGESSHIC DFIRKTLNAG AYSKVVQERL |
| 181 | VQAEYWHDPI KEDVYRNHSI FLADINQERG INESYKKNLM ALKKFVMVKF LNDSIVDPVD |
| 241 | SEWFGFYRSG QAKETIPLQE TSLYTQDRLG LKEMDNAGQL VFLATEGDHL QLSEEWFYAH |
| 301 | IIPFLG |

SEQ ID NO: 274
TRIPEPTIDYL-PEPTIDASE 1 (TPP1)
NP_000382.3

| | |
|---|---|
| 1 | MGLQACLLGL FALILSGKCS YSPEPDQRRT LPPGWVSLGR ADPEEELSLT FALRQQNVER |
| 61 | LSELVQAVSD PSSPQYGKYL TLENVADLVR PSPLTLHTVQ KWLLAAGAQK CHSVITQDFL |
| 121 | TCWLSIRQAE LLLPGAEFHH YVGGPTETHV VRSPHPYQLP QALAPHVDFV GGLHRFPPTS |
| 181 | SLRQRPEPQV TGTVGLHLGV TPSVIRKRYN LTSQDVGSGT SNNSQACAQF LEQYFHDSDL |
| 241 | AQFMRLFGGN FAHQASVARV VGQQGRGRAG IEASLDVQYL MSAGANISTW VYSSPGRHEG |
| 301 | QEPFLQWLML LSNESALPHV HTVSYGDDED SLSSAYIQRV NTELMKAAAR GLTLLFASGD |
| 361 | SGAGCWSVSG RHQFRPTFPA SSPYVTTVGG TSFQEPFLIT NEIVDYISGG GFSNVFPRPS |
| 421 | YQEEAVTKFL SSSPHLPPSS YFNASGRAYP DVAALSDGYW VVSNRVPIPW VSGTSASTPV |
| 481 | FGGILSLINE HRILSGRPPL GFLNPRLYQQ HGAGLFDVTR GCHESCLDEE VEGQGFCSGP |
| 541 | GWDPVTGWGT PNFPALLKTL LNP |

SEQ ID NO: 275
BATTENIN (CLN3)
AAI11069.1

| | |
|---|---|
| 1 | MLSAAHDILS HKRTSGNQSH AVLLADILPT LVIKLLAPLG LHLLPYSPRV LVSGICAAGS |
| 61 | FVLVAFSHSV GTSLCGVVFA SISSGLGEVT FLSLTAFYPR AVISWWSSGT GGAGLLGALS |
| 121 | YLGLTQAGLS PQQTLLSMLG IPALLLASYF LLLTSPEAQD PGGEEEAESA ARQPLIRTEA |
| 181 | PESKPGSSSS LSLRERWTVF KGLLWYIVPL VVVYFAEYFI NQGLFELLFF WNTSLSHAQQ |
| 241 | YRWYQMLYQA GVFASRSSLR CCRIRFTWAL ALLQCLNLVF LLADVWFGFL PSIYLVFLII |
| 301 | LYEGLLGGAA YVNTFHNIAL ETSDEHREFA MAATCISDTL GISLSGLLAL PLHDFLCQLS |

SEQ ID NO: 276
CLN6 TRANSMEMBRANE ER PROTEIN (CLN6)
NP_060352.1

| | |
|---|---|
| 1 | MEATRRRQHL GATGGPGAQL GASFLQARHG SVSADEAART APFHLDLWFY FTLQNWVLDF |
| 61 | GRPIAMLVFP LEWFPLNKPS VGDYFHMAYN VITPFLLLKL IERSPRTLPR SITYVSIIIF |
| 121 | IMGASIHLVG DSVNHRLLFS GYQHHLSVRE NPIIKNLKPE TLIDSFELLY YYDEYLGHCM |
| 181 | WYIPFFLILF MYFSGCFTAS KAESLIPGPA LLLVAPSGLY YWYLVTEGQI FILFIFTFFA |
| 241 | MLALVLHQKR KRLFLDSNGL FLFSSFALTL LLVALWVAWL WNDPVLRKKY PGVIYVPEPW |
| 301 | AFYTLHVSSR H |

SEQ ID NO: 277
MAJOR FACILITATOR SUPERFAMILY DOMAIN CONTAINING 8 (MFSD8)
AAH29503.1

| | |
|---|---|
| 1 | MAGLRNESEQ EPLLGDTPGS REWDILETEE HYKSRWRSIR ILYLTMFLSS VGFSVVMMSI |
| 61 | WPYLQKIDPT ADTSFLGWVI ASYSLGQMVA SPIFGLWSNY RPRKEPLIVS ILISVAANCL |
| 121 | YAYLHIPASH NKYYMLVARG LLGIGAGNVA VVRSYTAGAT SLQERTSSMA NISMCQALGF |
| 181 | ILGPVFQTCF TFLGEKGVTW DVIKLQINMY TTPVLLSAFL GILNIILILA ILREHRVDDS |
| 241 | GRQCKSINFE EASTDEAQVP QGNIDQVAVV AINVLFFVTL FIFALFETII TPLTMDMYAW |
| 301 | TQEQAVLYNG IILAALGVEA VVIFLGVKLL SKKIGERAIL LGGLIVVWVG FFILLPWGNQ |
| 361 | FPKIQWEDLH NNSIPNTIFG EIIIGLWKSP MEDDNERPTG CSIEQAWCLY TPVIHLAQFL |
| 421 | TSAVLIGLGY PVCNLMSYTL YSKILGPKPQ GVYMGWLTAS GSGARILGPM FISQVYAHWG |
| 481 | PRWAFSLVCG IIVLTITLLG VVYKRLIALS VRYGRIQE |

SEQ ID NO: 278
MYOSIN VIIA (MYO7A)
AAB03679.1

| | |
|---|---|
| 1 | MVILQQGDHV WMDLRLGQEF DVPIGAVVKL CDSGQVQVVD DEDNEHWISP QNATHIKPMH |
| 61 | PTSVHGVEDM IRLGDLNEAG ILRNLLIRYR DHLIYTYTGS ILVAVNPYQL LSIYSPEHIR |
| 121 | QYTNKKIGEM PPHIFAIADN CYFNMKRNSR DQCCIISGES GAGKTESTKL ILQFLAAISG |
| 181 | QHSWIEQQVL EATPILEAFG NAKTIRNDNS SRFGKYIDIH FNKRGAIEGA KIEQYLLEKS |
| 241 | RVCRQALDER NYHVFYCMLE GMSEDQKKKL GLGQASDYNY LAMGNCITCE GRVDSQEYAN |
| 301 | IRSAMKVLMF TDTENWEISK LLAAILHLGN LQYEARTFEN LDACEVLFSP SLATAASLLE |
| 361 | VNPPDLMSCL TSRTLITRGE TVSTPLSREQ ALDVRDAFVK GIYGRLFVWI VDKINAAIYK |
| 421 | PPSQDVKNSR RSIGLLDIFG FENFAVNSFE QLCINFANEH LQQFFVRHVF KLEQEEYDLE |
| 481 | SIDWLHIEFT DNQDALDMIA NKPMNIISLI DEESKFPKGT DTTMLHKLNS QHKLNANYIP |
| 541 | PKNNHETQFG INHFAGIVYY ETQGFLEKNR DTLHGDIIQL VHSSRNKFIK QIFQADVAMG |
| 601 | AETRKRSPTL SSQFKRSLEL LMRTLGACQP FFVRCIKPNE FKKPMLFDRH LCVRQLRYSG |
| 661 | MMETIRIRRA GYPIRYSFVE FVERYRVLLP GVKPAYKQGD LRGTCQRMAE AVLGTHDDWQ |
| 721 | IGKTKIFLKD HHDMLLEVER DKAITDRVIL LQKVIRGFKD RSNFLKLKNA ATLIQRHWRG |
| 781 | HNCRKNYGLM RLGFLRLQAL HRSRKLHQQY RLARQRIIQF QARCRAYLVR KAFRHRLWAV |
| 841 | LTVQAYARGM IARRLHQRLR AEYLWRLEAE KMRLAEEEKL RKEMSAKKAK EEAERKHQER |
| 901 | LAQLAREDAE RELKEKEAAR RKKELLEQME RARHEPVNHS DMVDKMFGFL GTSGGLPGQE |
| 961 | GQAPSGFEDL ERGRREMVEE DLDAALPLPD EDEEDLSEYK FAKFAATYFQ GTTTHSYTRR |
| 1021 | PLKQPLLYHD DEGDQLAALA VWITILRFMG DLPEPKYHTA MSDGSEKIPV MTKIYETLGK |
| 1081 | KTYKRELQAL QGEGEAQLPE GQKKSSVRHK LVHLTLKKKS KLTEEVTKRL HDGESTVQGN |
| 1141 | SMLEDRPTSN LEKLHFIIGN GILRPALRDE IYCQISKQLT HNPSKSSYAR GWILVSLCVG |
| 1201 | CFAPSEKFVK YLRNFIHGGP PGYAPYCEER LRRTFVNGTR TQPPSWLELQ ATKSKKPIML |
| 1261 | PVTFMDGTTK TLLTDSATTA KELCNALADK ISLKDRFGFS LYIALFDKVS SLGSGSDHVM |
| 1321 | DAISQCEQYA KEQGAQERNA PWRLFFRKEV FTPWHSPSED NVATNLIYQQ VVRGVKFGEY |
| 1381 | RCEKEDDLAE LASQQYFVDY GSEMILERLL NLVPTYIPDR EITPLKTLEK WAQLAIAAHK |
| 1441 | KGIYAQRRTD AQKVKEDVVS YARFKWPLLF SRFYEAYKFS GPSLPKNDVI VAVNWTGVYF |
| 1501 | VDEQEQVLLE LSFPEIMAVS SSRECRVWLS LGCSDLGCAA PHSGWAGLTP AGPCSPCWSC |
| 1561 | RGAKTTAPSF TLATIKGDEY TFTSSNAEDI RDLVVTFLEG LRKRSKYVVA LQDNPNPAGE |
| 1621 | ESGFLSFAKG DLIILDHDTG EQVMNSGWAN GINERTKQRG DFPTDCVYVM PTVIMPPREI |
| 1681 | VALVTMTPDQ RQDVVRLLQL RTAEPEVRAK PYTLEEFSYD YFRPPPKHTL SRVMVSKARG |
| 1741 | KDRLWSHTRE PLKQALLKKL LGSEELSQEA CLAFIAVLKY MGDYPSKRTR SVNELTDQIF |
| 1801 | EGPLKAEPLK DEAYVQILKQ LTDNHIRYSE ERGWELLWLC TGLFPPSNIL LPHVQRFLQS |
| 1861 | RKHCPLAIDC LQRLQKALRN GSRKYPPHLV EVEAIQHKTT QIFHKVYFPD DTDEAFEVES |
| 1921 | STKAKDFCQN IATRLLLKSS EGFSLFVKIA DKVISVPEND FFFDFVRHLT DWIKKARPIK |
| 1981 | DGIVPSLTYQ VFFMKKLWTT TVPGKDPMAD SIFHYYQELP KYLRGYHKCT REEVLQLGAL |
| 2041 | IYRVKFEEDK SYFPSIPKLL RELVPQDLIR QVSPDDWKRS IVAYFNKHAG KSKEEAKLAF |
| 2101 | LKLIFKWPTF GSAFFEVKQT TEPNFPEILL IAINKYGVSL IDPKTKDILT THPFTKISNW |
| 2161 | SSGNTYFHIT IGNLVRGSKL LCETSLGYKM DDLLTSYISQ MLTAMSKQRG SRSGK |

SEQ ID NO: 279
MYOSIN VIIA (MYO7A), ISOFORM CRA_A
EAW75018.1

| | |
|---|---|
| 1 | MVILQQGDHV WMDLRLGQEF DVPIGAVVKL CDSGQVQVVD DEDNEHWISP QNATHIKPMH |
| 61 | PTSVHGVEDM IRLGDLNEAG ILRNLLIRYR DHLIYTYTGS ILVAVNPYQL LSIYSPEHIR |
| 121 | QYTNKKIGEM PPHIFAIADN CYFNMKRNSR DQCCIISGES GAGKTESTKL ILQFLAAISG |
| 181 | QHSWIEQQVL EATPILEAFG NAKTIRNDNS SRFGKYIDIH FNKRGAIEGA KIEQYLLEKS |
| 241 | RVCRQALDER NYHVFYCMLE GMSEDQKKKL GLGQASDYNY LAMGNCITCE GRVDSQEYAN |
| 301 | IRSAMKVLMF TDTENWEISK LLAAILHLGN LQYEARTFEN LDACEVLFSP SLATAASLLE |
| 361 | VNPPDLMSCL TSRTLITRGE TVSTPLSREQ ALDVRDAFVK GIYGRLFVWI VDKINAAIYK |
| 421 | PPSQDVKNSR RSIGLLDIFG FENFAVNSFE QLCINFANEH LQQFFVRHVF KLEQEEYDLE |
| 481 | SIDWLHIEFT DNQDALDMIA NKPMNIISLI DEESKFPKGT DTTMLHKLNS QHKLNANYIP |
| 541 | PKNNHETQFG INHFAGIVYY ETQGFLEKNR DTLHGDIIQL VHSSRNKFIK QIFQADVAMG |
| 601 | AETRKRSPTL SSQFKRSLEL LMRTLGACQP FFVRCIKPNE FKKPMLFDRH LCVRQLRYSG |
| 661 | MMETIRIRRA GYPIRYSFVE FVERYRVLLP GVKPAYKQGD LRGTCQRMAE AVLGTHDDWQ |
| 721 | IGKTKIFLKD HHDMLLEVER DKAITDRVIL LQKVIRGFKD RSNFLKLKNA ATLIQRHWRG |
| 781 | HNCRKNYGLM RLGFLRLQAL HRSRKLHQQY RLARQRIIQF QARCRAYLVR KAFRHRLWAV |
| 841 | LTVQAYARGM IARRLHQRLR AEYLWRLEAE KMRLAEEEKL RKEMSAKKAK EEAERKHQER |
| 901 | LAQLAREDAE RELKEKEAAR RKKELLEQME RARHEPVNHS DMVDKMFGFL GTSGGLPGQE |
| 961 | GQAPSGFEDL ERGRREMVEE DLDAALPLPD EDEEDLSEYK FAKFAATYFQ GTTTHSYTRR |
| 1021 | PLKQPLLYHD DEGDQLAALA VWITILRFMG DLPEPKYHTA MSDGSEKIPV MTKIYETLGK |
| 1081 | KTYKRELQAL QGEGEAQLPE GQKKSSVRHK LVHLTLKKKS KLTEEVTKRL HDGESTVQGN |
| 1141 | SMLEDRPTSN LEKLHFIIGN GILRPALRSV PGGGDTRA |

SEQ ID NO: 280
MYOSIN VIIA (MYO7A), ISOFORM CRA_B
EAW75019.1

| | |
|---|---|
| 1 | MVILQQGDHV WMDLRLGQEF DVPIGAVVKL CDSGQVQVVD DEDNEHWISP QNATHIKPMH |
| 61 | PTSVHGVEDM IRLGDLNEAG ILRNLLIRYR DHLIYTYTGS ILVAVNPYQL LSIYSPEHIR |
| 121 | QYTNKKIGEM PPHIFAIADN CYFNMKRNSR DQCCIISGES GAGKTESTKL ILQFLAAISG |
| 181 | QHSWIEQQVL EATPILEAFG NAKTIRNDNS SRFGKYIDIH FNKRGAIEGA KIEQYLLEKS |
| 241 | RVCRQALDER NYHVFYCMLE GMSEDQKKKL GLGQASDYNY LAMGNCITCE GRVDSQEYAN |
| 301 | IRSAMKVLMF TDTENWEISK LLAAILHLGN LQYEARTFEN LDACEVLFSP SLATAASLLE |
| 361 | VNPPDLMSCL TSRTLITRGE TVSTPLSREQ ALDVRDAFVK GIYGRLFVWI VDKINAAIYK |
| 421 | PPSQDVKNSR RSIGLLDIFG FENFAVNSFE QLCINFANEH LQQFFVRHVF KLEQEEYDLE |
| 481 | SIDWLHIEFT DNQDALDMIA NKPMNIISLI DEESKFPKGT DTTMLHKLNS QHKLNANYIP |
| 541 | PKNNHETQFG INHFAGIVYY ETQGFLEKNR DTLHGDIIQL VHSSRNKFIK QIFQADVAMG |
| 601 | AETRKRSPTL SSQFKRSLEL LMRTLGACQP FFVRCIKPNE FKKPMLFDRH LCVRQLRYSG |
| 661 | MMETIRIRRA GYPIRYSFVE FVERYRVLLP GVKPAYKQGD LRGTCQRMAE AVLGTHDDWQ |
| 721 | IGKTKIFLKD HHDMLLEVER DKAITDRVIL LQKVIRGFKD RSNFLKLKNA ATLIQRHWRG |
| 781 | HNCRKNYGLM RLGFLRLQAL HRSRKLHQQY RLARQRIIQF QARCRAYLVR KAFRHRLWAV |
| 841 | LTVQAYARGM IARRLHQRLR AEYLWRLEAE KMRLAEEEKL RKEMSAKKAK EEAERKHQER |
| 901 | LAQLAREDAE RELKEKEAAR RKKELLEQME RARHEPVNHS DMVDKMFGFL GTSGGLPGQE |
| 961 | GQAPSGFEDL ERGRREMVEE DLDAALPLPD EDEEDLSEYK FAKFAATYFQ GTTTHSYTRR |
| 1021 | PLKQPLLYHD DEGDQLAALA VWITILRFMG DLPEPKYHTA MSDGSEKIPV MTKIYETLGK |
| 1081 | KTYKRELQAL QGEGEAQLPE GQKKSSVRHK LVHLTLKKKS KLTEEVTKRL HDGESTVQGN |
| 1141 | SMLEDRPTSN LEKLHFIIGN GILRPALRDE IYCQISKQLT HNPSKSSYAR GWILVSLCVG |
| 1201 | CFAPSEKFVK YLRNFIHGGP PGYAPYCEER LRRTFVNGTR TQPPSWLELQ ATKSKKPIML |
| 1261 | PVTFMDGTTK TLLTDSATTA KELCNALADK ISLKDRFGFS LYIALFDKVS SLGSGSDHVM |
| 1321 | DAISQCEQYA KEQGAQERNA PWRLFFRKEV FTPWHSPSED NVATNLIYQQ VVRGVKFGEY |
| 1381 | RCEKEDDLAE LASQQYFVDY GSEMILERLL NLVPTYIPDR EITPLKTLEK WAQLAIAAHK |
| 1441 | KGIYAQRRTD AQKVKEDVVS YARFKWPLLF SRFYEAYKFS GPSLPKNDVI VAVNWTGVYF |
| 1501 | VDEQEQVLLE LSFPEIMAVS SSRECRVWLS LGCSDLGCAA PHSGWAGLTP AGPCSPCWSC |
| 1561 | RGAKTTAPSF TLATIKGDEY TFTSSNAEDI RDLVVTFLEG LRKRSKYVVA LQDNPNPAGE |
| 1621 | ESGFLSFAKG DLIILDHDTG EQVMNSGWAN GINERTKQRG DFPTDCVYVM PTVIMPPREI |
| 1681 | VALVTMTPDQ RQDVVRLLQL RTAEPEVRAK PYTLEEFSYD YFRPPPKHTL SRVMVSKARG |
| 1741 | KDRLWSHTRE PLKQALLKKL LGSEELSQEA CLAFIAVLKY MGDYPSKRTR SVNELTDQIF |
| 1801 | EGPLKAEPLK DEAYVQILKQ LTDNHIRYSE ERGWELLWLC TGLFPPSNIL LPHVQRFLQS |
| 1861 | RKHCPLAIDC LQRLQKALRN GSRKYPPHLV EVEAIQHKTT QIFHKVYFPD DTDEAFEVES |
| 1921 | STKAKDFCQN IATRLLLKSS EGFSLFVKIA DKVISVPEND FFFDFVRHLT DWIKKARPIK |
| 1981 | DGIVPSLTYQ VFFMKKLWTT TVPGKDPMAD SIFHYYQELP KYLRGYHKCT REEVLQLGAL |
| 2041 | IYRVKFEEDK SYFPSIPKLL RELVPQDLIR QVSPDDWKRS IVAYFNKHAG KSKEEAKLAF |
| 2101 | LKLIFKWPTF GSAFFEVKQT TEPNFPEILL IAINKYGVSL IDPKTKDILT THPFTKISNW |
| 2161 | SSGNTYFHIT IGNLVRGSKL LCETSLGYKM DDLLTSYISQ MLTAMSKQRG SRSGK |

SEQ ID NO: 281
MYOSIN VIIA (MYO7A), ISOFORM CRA_C
EAW75020.1

| | |
|---|---|
| 1 | MVILQQGDHV WMDLRLGQEF DVPIGAVVKL CDSGQVQVVD DEDNEHWISP QNATHIKPMH |
| 61 | PTSVHGVEDM IRLGDLNEAG ILRNLLIRYR DHLIYTYTGS ILVAVNPYQL LSIYSPEHIR |
| 121 | QYTNKKIGEM PPHIFAIADN CYFNMKRNSR DQCCIISGES GAGKTESTKL ILQFLAAISG |
| 181 | QHSWIEQQVL EATPILEAFG NAKTIRNDNS SRFGKYIDIH FNKRGAIEGA KIEQYLLEKS |
| 241 | RVCRQALDER NYHVFYCMLE GMSEDQKKKL GLGQASDYNY LAMGNCITCE GRVDSQEYAN |
| 301 | IRSAMKVLMF TDTENWEISK LLAAILHLGN LQYEARTFEN LDACEVLFSP SLATAASLLE |
| 361 | VNPPDLMSCL TSRTLITRGE TVSTPLSREQ ALDVRDAFVK GIYGRLFVWI VDKINAAIYK |
| 421 | PPSQDVKNSR RSIGLLDIFG FENFAVNSFE QLCINFANEH LQQFFVRHVF KLEQEEYDLE |
| 481 | SIDWLHIEFT DNQDALDMIA NKPMNIISLI DEESKFPKGT DTTMLHKLNS QHKLNANYIP |
| 541 | PKNNHETQFG INHFAGIVYY ETQGFLEKNR DTLHGDIIQL VHSSRNKFIK QIFQADVAMG |
| 601 | AETRKRSPTL SSQFKRSLEL LMRTLGACQP FFVRCIKPNE FKKPMLFDRH LCVRQLRYSG |
| 661 | MMETIRIRRA GYPIRYSFVE FVERYRVLLP GVKPAYKQGD LRGTCQRMAE AVLGTHDDWQ |
| 721 | IGKTKIFLKD HHDMLLEVER DKAITDRVIL LQKVIRGFKD RSNFLKLKNA ATLIQRHWRG |
| 781 | HNCRKNYGLM RLGFLRLQAL HRSRKLHQQY RLARQRIIQF QARCRAYLVR KAFRHRLWAV |
| 841 | LTVQAYARGM IARRLHQRLR AEYLWRLEAE KMRLAEEEKL RKEMSAKKAK EEAERKHQER |
| 901 | LAQLAREDAE RELKEKEAAR RKKELLEQME RARHEPVNHS DMVDKMFGFL GTSGGLPGQE |
| 961 | GQAPSGFEDL ERGRREMVEE DLDAALPLPD EDEEDLSEYK FAKFAATYFQ GTTTHSYTRR |
| 1021 | PLKQPLLYHD DEGDQLAALA VWITILRFMG DLPEPKYHTA MSDGSEKIPV MTKIYETLGK |
| 1081 | KTYKRELQAL QGEGEAQLPE GQKKSSVRHK LVHLTLKKKS KLTEEVTKRL HDGESTVQGN |
| 1141 | SMLEDRPTSN LEKLHFIIGN GILRPALRDE IYCQISKQLT HNPSKSSYAR GWILVSLCVG |
| 1201 | CFAPSEKFVK YLRNFIHGGP PGYAPYCEER LRRTFVNGTR TQPPSWLELQ ATKSKKPIML |
| 1261 | PVTFMDGTTK TLLTDSATTA KELCNALADK ISLKDRFGFS LYIALFDKVS SLGSGSDHVM |
| 1321 | DAISQCEQYA KEQGAQERNA PWRLFFRKEV FTPWHSPSED NVATNLIYQQ VVRGVKFGEY |
| 1381 | RCEKEDDLAE LASQQYFVDY GSEMILERLL NLVPTYIPDR EITPLKTLEK WAQLAIAAHK |
| 1441 | KGIYAQRRTD AQKVKEDVVS YARFKWPLLF SRFYEAYKFS GPSLPKNDVI VAVNWTGVYF |
| 1501 | VDEQEQVLLE LSFPEIMAVS SSRECRVWLS LGCSDLGCAA PHSGWAGLTP AGPCSPCWSC |
| 1561 | RGAKTTAPSF TLATIKGDEY TFTSSNAEDI RDLVVTFLEG LRKRSKYVVA LQDNPNPAGE |
| 1621 | ESGFLSFAKG DLIILDHDTG EQVMNSGWAN GINERTKQRG DFPTDCVYVM PTVIMPPREI |
| 1681 | VALVTMTPDQ RQDVVRLLQL RTAEPEVRAK PYTLEEFSYD YFRPPPKHTL SRVMVSKARG |
| 1741 | KDRLWSHTRE PLKQALLKKL LGSEELSQEA CLAFIDIPVL KYMGDYPSKR TRSVNELTDQ |
| 1801 | IFEGPLKAEP LKDEAYVQIL KQLTDNHIRY SEERGWELLW LCTGLFPPSN ILLPHVQRFL |
| 1861 | QSRKHCPLAI DCLQRLQKAL RNGSRKYPPH LVEVEAIQHK TTQIFHKVYF PDDTDEAFEV |
| 1921 | ESSTKAKDFC QNIATRLLLK SSEGFSLFVK IADKVISVPE NDFFFDFVRH LTDWIKKARP |
| 1981 | IKDGIVPSLT YQVFFMKKLW TTTVPGKDPM ADSIFHYYQE LPKYLRGYHK CTREEVLQLG |
| 2041 | ALIYRVKFEE DKSYFPSIPK LLRELVPQDL IRQVSPDDWK RSIVAYFNKH AGKSKEEAKL |
| 2101 | AFLKLIFKWP TFGSAFFEVK QTTEPNFPEI LLIAINKYGV SLIDPKTKDI LITHPFTKIS |
| 2161 | NWSSGNTYFH ITIGNLVRGS KLLCETSLGY KMDDLLTSYI SQMLTAMSKQ RGSRSGK |

SEQ ID NO: 282
MYOSIN VIIA (MYO7A), ISOFORM CRA_D
EAW75021.1

| | |
|---|---|
| 1 | MVILQQGDHV WMDLRLGQEF DVPIGAVVKL CDSGQVQVVD DEDNEHWISP QNATHIKPMH |
| 61 | PTSVHGVEDM IRLGDLNEAG ILRNLLIRYR DHLIYTYTGS ILVAVNPYQL LSIYSPEHIR |
| 121 | QYTNKKIGEM PPHIFAIADN CYFNMKRNSR DQCCIISGES GAGKTESTKL ILQFLAAISG |
| 181 | QHSWIEQQVL EATPILEAFG NAKTIRNDNS SRFGKYIDIH FNKRGAIEGA KIEQYLLEKS |
| 241 | RVCRQALDER NYHVFYCMLE GMSEDQKKKL GLGQASDYNY LAMGNCITCE GRVDSQEYAN |
| 301 | IRSAMKVLMF TDTENWEISK LLAAILHLGN LQYEARTFEN LDACEVLFSP SLATAASLLE |
| 361 | VNPPDLMSCL TSRTLITRGE TVSTPLSREQ ALDVRDAFVK GIYGRLFVWI VDKINAAIYK |
| 421 | PPSQDVKNSR RSIGLLDIFG FENFAVNSFE QLCINFANEH LQQFFVRHVF KLEQEEYDLE |
| 481 | SIDWLHIEFT DNQDALDMIA NKPMNIISLI DEESKFPKGT DTTMLHKLNS QHKLNANYIP |
| 541 | PKNNHETQFG INHFAGIVYY ETQGFLEKNR DTLHGDIIQL VHSSRNKFIK QIFQADVAMG |
| 601 | AETRKRSPTL SSQFKRSLEL LMRTLGACQP FFVRCIKPNE FKKPMLFDRH LCVRQLRYSG |
| 661 | MMETIRIRRA GYPIRYSFVE FVERYRVLLP GVKPAYKQGD LRGTCQRMAE AVLGTHDDWQ |
| 721 | IGKTKIFLKD HHDMLLEVER DKAITDRVIL LQKVIRGFKD RCVFPPAPPL LSPHTGVRVV |
| 781 | FGSPLLCPHE H |

SEQ ID NO: 283
MYOSIN VIIA (MYO7A), ISOFORM CRA_E
EAW75022.1

| | |
|---|---|
| 1 | MVILQQGDHV WMDLRLGQEF DVPIGAVVKL CDSGQVQVVD DEDNEHWISP QNATHIKPMH |
| 61 | PTSVHGVEDM IRLGDLNEAG ILRNLLIRYR DHLIYTYTGS ILVAVNPYQL LSIYSPEHIR |
| 121 | QYTNKKIGEM PPHIFAIADN CYFNMKRNSR DQCCIISGES GAGKTESTKL ILQFLAAISG |
| 181 | QHSWIEQQVL EATPILEAFG NAKTIRNDNS SRFGKYIDIH FNKRGAIEGA KIEQYLLEKS |
| 241 | RVCRQALDER NYHVFYCMLE GMSEDQKKKL GLGQASDYNY LAMGNCITCE GRVDSQEYAN |
| 301 | IRSAMKVLMF TDTENWEISK LLAAILHLGN LQYEARTFEN LDACEVLFSP SLATAASLLE |
| 361 | VNPPDLMSCL TSRTLITRGE TVSTPLSREQ ALDVRDAFVK GIYGRLFVWI VDKINAAIYK |
| 421 | PPSQDVKNSR RSIGLLDIFG FENFAVNSFE QLCINFANEH LQQFFVRHVF KLEQEEYDLE |
| 481 | SIDWLHIEFT DNQDALDMIA NKPMNIISLI DEESKFPKGT DTTMLHKLNS QHKLNANYIP |
| 541 | PKNNHETQFG INHFAGIVYY ETQGFLEKNR DTLHGDIIQL VHSSRNKFIK QIFQADVAMG |
| 601 | AETRKRSPTL SSQFKRSLEL LMRTLGACQP FFVRCIKPNE FKKPMLFDRH LCVRQLRYSG |
| 661 | MMETIRIRRA GYPIRYSFVE FVERYRVLLP GVKPAYKQGD LRGTCQRMAE AVLGTHDDWQ |
| 721 | IGKTKIFLKD HHDMLLEVER DKAITDRVIL LQKVIRGFKD RSNFLKLKNA ATLIQRHWRG |
| 781 | HNCRKNYGLM RLGFLRLQAL HRSRKLHQQY RLARQRIIQF QARCRAYLVR KAFRHRLWAV |
| 841 | LTVQAYARGM IARRLHQRLR AEYLWRLEAE KMRLAEEEKL RKEMSAKKAK EEAERKHQER |
| 901 | LAQLAREDAE RELKEKEAAR RKKELLEQME RARHEPVNHS DMVDKMFGFL GTSGGLPGQE |
| 961 | GQAPSGFEDL ERGRREMVEE DLDAALPLPD EDEEDLSEYK FAKFAATYFQ GTTTHSYTRR |
| 1021 | PLKQPLLYHD DEGDQLAALA VWITILRFMG DLPEPKYHTA MSDGSEKIPV MTKIYETLGK |
| 1081 | KTYKRELQAL QGEGEAQLPE GQKKSSVRHK LVHLTLKKKS KLTEEVTKRL HDGESTVQGN |
| 1141 | SMLEDRPTSN LEKLHFIIGN GILRPALRDE IYCQISKQLT HNPSKSSYAR GWILVSLCVG |
| 1201 | CFAPSEKFVK YLRNFIHGGP PGYAPYCEER LRRTFVNGTR TQPPSWLELQ ATKSKKPIML |
| 1261 | PVTFMDGTTK TLLTDSATTA KELCNALADK ISLKDRFGFS LYIALFDKVS SLGSGSDHVM |
| 1321 | DAISQCEQYA KEQGAQERNA PWRLFFRKEV FTPWHSPSED NVATNLIYQQ VVRGVKFGEY |
| 1381 | RCEKEDDLAE LASQQYFVDY GSEMILERLL NLVPTYIPDR EITPLKTLEK WAQLAIAAHK |
| 1441 | KGIYAQRRTD AQKVKEDVVS YARFKWPLLF SRFYEAYKFS GPSLPKNDVI VAVNWTGVYF |
| 1501 | VDEQEQVLLE LSFPEIMAVS SSRGAKTTAP SFTLATIKGD EYTFTSSNAE DIRDLVVTFL |
| 1561 | EGLRKRSKYV VALQDNPNPA GEESGFLSFA KGDLIILDHD TGEQVMNSGW ANGINERTKQ |
| 1621 | RGDFPTDCVY VMPTVTMPPR EIVALVTMTP DQRQDVVRLL QLRTAEPEVR AKPYTLEEFS |
| 1681 | YDYFRPPPKH TLSRVMVSKA RGKDRLWSHT REPLKQALLK KLLGSEELSQ EACLAFIDIP |
| 1741 | VLKYMGDYPS KRTRSVNELT DQIFEGPLKA EPLKDEAYVQ ILKQLTDNHI RYSEERGWEL |
| 1801 | LWLCTGLFPP SNILLPHVQR FLQSRKHCPL AIDCLQRLQK ALRNGSRKYP PHLVEVEAIQ |
| 1861 | HKTIQIFHKV YFPDDTDEAF EVESSTKAKD FCQNIATRLL LKSSEGFSLF VKIADKVISV |
| 1921 | PENDFFFDFV RHLTDWIKKA RPIKDGIVPS LTYQVFFMKK LWTTTVPGKD PMADSIFHYY |
| 1981 | QELPKYLRGY HKCTREEVLQ LGALIYRVKF EEDKSYFPSI PKLLRELVPQ DLIRQVSPDD |
| 2041 | WKRSIVAYFN KHAGKSKEEA KLAFLKLIFK WPTFGSAFFE QTTEPNFPEI LLIAINKYGV |
| 2101 | SLIDPKTKDI LITHPFTKIS NWSSGNTYFH ITIGNLVRGS KLLCETSLGY KMDDLLTSYI |
| 2161 | SQMLTAMSKQ RGSRSGK |

SEQ ID NO: 284
MYOSIN VITA (MYO7A), ISOFORM CRA_F
EAW75023.1

| | |
|---|---|
| 1 | MLEGMSEDQK KKLGLGQASD YNYLAMGNCI TCEGRVDSQE YANIRSAMKV LMFTDTENWE |
| 61 | ISKLLAAILH LGNLQYEART FENLDACEVL FSPSLATAAS LLEVNPPDLM SCLTSRTLIT |
| 121 | RGETVSTPLS REQALDVRDA FVKGIYGRLF VWIVDKINAA IYKPPSQDVK NSRRSIGLLD |
| 181 | IFGFENFAVN SFEQLCINFA NEHLQQFFVR HVFKLEQEEY DLESIDWLHI EFTDNQDALD |
| 241 | MIANKPMNII SLIDEESKFP KGTDTTMLHK LNSQHKLNAN YIPPKNNHET QFGINHFAGI |
| 301 | VYYETQGFLE KNRDTLHGDI IQLVHSSRNK FIKQIFQADV AMGAETRKRS PTLSSQFKRS |
| 361 | LELLMRTLGA CQPFFVRCIK PNEFKKPMLF DRHLCVRQLR YSGMMETIRI RRAGYPIRYS |
| 421 | FVEFVERYRV LLPGVKPAYK QGDLRGTCQR MAEAVLGTHD DWQIGKTKIF LKDHHDMLLE |
| 481 | VERDKAITDR VILLQKVIRG FKDRSNFLKL KNAATLIQRH WRGHNCRKNY GLMRLGFLRL |
| 541 | QALHRSRKLH QQYRLARQRI IQFQARCRAY LVRKAFRHRL WAVLTVQAYA RGMIARRLHQ |
| 601 | RLRAEYLWRL EAEKMRLAEE EKLRKEMSAK KAKEEAERKH QERLAQLARE DAERELKEKE |
| 661 | AARRKKELLE QMERARHEPV NHSDMVDKMF GFLGTSGGLP GQEGQAPSGF EDLERGRREM |
| 721 | VEEDLDAALP LPDEDEEDLS EYKFAKFAAT YFQGTTTHSY TRRPLKQPLL YHDDEGDQLA |
| 781 | ALAVWITILR FMGDLPEPKY HTAMSDGSEK IPVMTKIYET LGKKTYKREL QALQGEGEAQ |
| 841 | LPEGQKKSSV RHKLVHLTLK KKSKLTEEVT KRLHDGESTV QGNSMLEDRP TSNLEKLHFI |
| 901 | IGNGILRPAL RDEIYCQISK QLTHNPSKSS YARGWILVSL CVGCFAPSEK FVKYLRNFIH |
| 961 | GGPPGYAPYC EERLRRTFVN GTRTQPPSWL ELQATKSKKP IMLPVTFMDG TTKTLLTDSA |
| 1021 | TTAKELCNAL ADKISLKDRF GFSLYIALFD KVSSLGSGSD HVMDAISQCE QYAKEQGAQE |
| 1081 | RNAPWRLFFR KEVFTPWHSP SEDNVATNLI YQQVVRGVKF GEYRCEKEDD LAELASQQYF |
| 1141 | VDYGSEMILE RLLNLVPTYI PDREITPLKT LEKWAQLAIA AHKKGIYAQR RTDAQKVKED |
| 1201 | VVSYARFKWP LLFSRFYEAY KFSGPSLPKN DVIVAVNWTG VYFVDEQEQV LLELSFPEIM |
| 1261 | AVSSSRECRV WLSLGCSDLG CAAPHSGWAG LTPAGPCSPC WSCRGAKTTA PSFTLATIKG |
| 1321 | DEYTFTSSNA EDIRDLVVTF LEGLRKRSKY VVALQDNPNP AGEESGFLSF AKGDLIILDH |
| 1381 | DTGEQVMNSG WANGINERTK QRGDFPTDCV YVMPTVTMPP REIVALVTMT PDQRQDVVRL |
| 1441 | LQLRTAEPEV RAKPYTLEEF SYDYFRPPPK HTLSRVMVSK ARGKDRLWSH TREPLKQALL |
| 1501 | KKLLGSEELS QEACLAFIAV LKYMGDYPSK RTRSVNELTD QIFEGPLKAE PLKDEAYVQI |
| 1561 | LKQLTDNHIR YSEERGWELL WLCTGLFPPS NILLPHVQRF LQSRKHCPLA IDCLQRLQKA |
| 1621 | LRNGSRKYPP HLVEVEAIQH KTTQIFHKVY FPDDTDEAFE VESSTKAKDF CQNIATRLLL |
| 1681 | KSSEGFSLFV KIADKVISVP ENDFFFDFVR HLTDWIKKAR PIKDGIVPSL TYQVFFMKKL |
| 1741 | WTTTVPGKDP MADSIFHYYQ ELPKYLRGYH KCTREEVLQL GALIYRVKFE EDKSYFPSIP |
| 1801 | KLLRELVPQD LIRQVSPDDW KRSIVAYFNK HAGKSKEEAK LAFLKLIFKW PTFGSAFFEV |
| 1861 | KQTTEPNFPE ILLIAINKYG VSLIDPKTKD ILTTHPFTKI SNWSSGNTYF HITIGNLVRG |
| 1921 | SKLLCETSLG YKMDDLLTSY ISQMLTAMSK QRGSRSGK |

SEQ ID NO: 285
CADHERIN RELATED 23 (CDH23)
AAG27034.2

| | |
|---|---|
| 1 | MGRHVATSCH VAWLLVLISG CWGQVNRLPF FTNHFFDTYL LISEDTPVGS SVTQLLAQDM |
| 61 | DNDPLVFGVS GEEASRFFAV EPDTGVVWLR QPLDRETKSE FTVEFSVSDH QGVITRKVNI |
| 121 | QVGDVNDNAP TFHNQPYSVR IPENTPVGTP IFIVNATDPD LGAGGSVLYS FQPPSQFFAI |
| 181 | DSARGIVTVI RELDYETTQA YQLTVNATDQ DKTRPLSTLA NLAIIITDVQ DMDPIFINLP |
| 241 | YSTNIYEHSP PGTTVRIITA IDQDKGRPRG IGYTIVSGNT NSIFALDYIS GVLTLNGLLD |
| 301 | RENPLYSHGF ILTVKGTELN DDRTPSDATV TTTFNILVID INDNAPEFNS SEYSVAITEL |
| 361 | AQVGFALPLF IQVVDKDENL GLNSMFEVYL VGNNSHHFII SPTSVQGKAD IRIRVAIPLD |
| 421 | YETVDRYDFD LFANESVPDH VGYAKVKITL INENDNRPIF SQPLYNISLY ENVTVGTSVL |
| 481 | TVLATDNDAG TFGEVSYFFS DDPDRFSLDK DTGLIMLIAR LDYELIQRFT LTIIARDGGG |
| 541 | EETTGRVRIN VLDVNDNVPT FQKDAYVGAL RENEPSVTQL VRLRATDEDS PPNNQITYSI |
| 601 | VSASAFGSYF DISLYEGYGV ISVSRPLDYE QISNGLIYLT VMAMDAGNPP LNSTVPVTIE |
| 661 | VFDENDNPPT FSKPAYFVSV VENIMAGATV LFLNATDLDR SREYGQESII YSLEGSTQFR |
| 721 | INARSGEITT TSLLDRETKS EYILIVRAVD GGVGHNQKTG IATVNITLLD INDNHPTWKD |
| 781 | APYYINLVEM TPPDSDVTTV VAVDPDLGEN GTLVYSIQPP NKFYSLNSTT GKIRTTHAML |
| 841 | DRENPDPHEA ELMRKIVVSV TDCGRPPLKA TSSATVFVNL LDLNDNDPTF QNLPFVAEVL |
| 901 | EGIPAGVSIY QVVAIDLDEG LNGLVSYRMP VGMPRMDFLI NSSSGVVVTT TELDRERIAE |
| 961 | YQLRVVASDA GTPTKSSTST LTIHVLDVND ETPTFFPAVY NVSVSEDVPR EFRVVWLNCT |
| 1021 | DNDVGLNAEL SYFITGGNVD GKFSVGYRDA VVRTVVGLDR ETTAAYMLIL EAIDNGPVGK |
| 1081 | RHTGTATVFV TVLDVNDNRP IFLQSSYEAS VPEDIPEGHS ILQLKATDAD EGEFGRVWYR |
| 1141 | ILHGNHGNNF RIHVSNGLLM RGPRPLDRER NSSHVLIVEA YNHDLGPMRS SVRVIVYVED |
| 1201 | INDEAPVFTQ QQYSRLGLRE TAGIGTSVIV VQATDRDSGD GGLVNYRILS GAEGKFEIDE |
| 1261 | STGLIITVNY LDYETKTSYM MNVSATDQAP PFNQGFCSVY ITLLNELDEA VQFSNASYEA |
| 1321 | AILENLALGT EIVRVQAYSI DNLNQITYRF DAYTSTQAKA LFKIDAITGV ITVQGLVDRE |
| 1381 | KGDFYTLTVV ADDGGPKVDS TVKVYITVLD ENDNSPRFDF TSDSAVSIPE DCPVGQRVAT |
| 1441 | VKAWDPDAGS NGQVVFSLAS GNIAGAFEIV TTNDSIGEVF VARPLDREEL DHYILQVVAS |
| 1501 | DRGTPPRKKD HILQVTILDI NDNPPVIESP FGYNVSVNEN VGGGTAVVQV RATDRDIGIN |
| 1561 | SVLSYYITEG NKDMTFRMDR ISGEIATRPA PPDRERQSFY HLVATVEDEG TPTLSATTHV |
| 1621 | YVTIVDENDN APMFQQPHYE VLLDEGPDTL NTSLITIQAL DLDEGPNGTV TYAIVAGNIV |
| 1681 | NTFRIDRHMG VITAAKELDY EISHGRYTLI VTATDQCPIL SHRLTSTTTV LVNVNDINDN |
| 1741 | VPTFPRDYEG PFEVTEGQPG PRVWTFLAHD RDSGPNGQVE YSIMDGDPLG EFVISPVEGV |
| 1801 | LRVRKDVELD RETIAFYNLT ICARDRGMPP LSSTMLVGIR VLDINDNDPV LLNLPMNITI |
| 1861 | SENSPVSSFV AHVLASDADS GCNARLTFNI TAGNRERAFF INATTGIVTV NRPLDRERIP |
| 1921 | EYKLTISVKD NPENPRIARR DYDLLLIFLS DENDNHPLFT KSTYQAEVME NSPAGTPLTV |
| 1981 | LNGPILALDA DQDIYAVVTY QLLGAQSGLF DINSSTGVVT VRSGVIIDRE AFSPPILELL |
| 2041 | LLAEDIGLLN STAHLLITIL DDNDNRPTFS PATLTVHLLE NCPPGFSVLQ VTATDEDSGL |
| 2101 | NGELVYRIEA GAQDRFLIHL VTGVIRVGNA TIDREEQESY RLTVVATDRG TVPLSGTAIV |
| 2161 | TILIDDINDS RPEFLNPIQT VSVLESAEPG TVIANITAID HDLNPKLEYH IVGIVAKDDT |
| 2221 | DRLVPNQEDA FAVNINTGSV MVKSPMNREL VATYEVTLSV IDNASDLPER SVSVPNAKLT |
| 2281 | VNVLDVNDNT PQFKPFGITY YMERILEGAT PGTTLIAVAA VDPDKGLNGL VTYTLLDLVP |
| 2341 | PGYVQLEDSS AGKVIANRTV DYEEVHWLNF TVRASDNGSP PRAAEIPVYL EIVDINDNNP |
| 2401 | IFDQPSYQEA VFEDVPVGTI ILTVTATDAD SGNFALIEYS LGDGESKFAI NPTTGDIYVL |
| 2461 | SSLDREKKDH YILTALAKDN PGDVASNRRE NSVQVVIQVL DVNDCRPQFS KPQFSTSVYE |
| 2521 | NEPAGTSVIT MMATDQDEGP NGELTYSLEG PGVEAFHVDM DSGLVTTQRP LQSYEKFSLT |
| 2581 | VVATDGGEPP LWGTTMLLVE VIDVNDNRPV FVRPPNGTIL HIREEIPLRS NVYEVYATDK |
| 2641 | DEGLNGAVRY SFLKTAGNRD WEFFIIDPIS GLIQTAQRLD RESQAVYSLI LVASDLGQPV |
| 2701 | PYETMQPLQV ALEDIDDNEP LFVRPPKGSP QYQLLTVPEH SPRGTLVGNV TGAVDADEGP |
| 2761 | NAIVYYFIAA GNEEKNFHLQ PDGCLLVLRD LDREREAIFS FIVKASSNRS WTPPRGPSPT |
| 2821 | LDLVADLTLQ EVRVVLEDIN DQPPRFTKAE YTAGVATDAK VGSELIQVLA LDADIGNNSL |
| 2881 | VFYSILAIHY FRALANDSED VGQVFTMGSM DGILRTFDLF MAYSPGYFVV DIVARDLAGH |
| 2941 | NDTAIIGIYI LRDDQRVKIV INEIPDRVRG FEEEFIHLLS NITGAIVNTD NVQFHVDKKG |
| 3001 | RVNFAQTELL IHVVNRDTNR ILDVDRVIQM IDENKEQLRN LFRNYNVLDV QPAISVRLPD |
| 3061 | DMSALQMAII VLAILLFLAA MLFVLMNWYY RTVHKRKLKA IVAGSAGNRG FIDIMDMPNT |
| 3121 | NKYSFDGANP VWLDPFCRNL ELAAQAEHED DLPENLSEIA DLWNSPTRTH GTFGREPAAV |
| 3181 | KPDDDRYLRA AIQEYDNIAK LGQIIREGPI KGSLLKVVLE DYLRLKKLFA QRMVQKASSC |
| 3241 | HSSISELIQT ELDEEPGDHS PGQGSLRFRH KPPVELKGPD GIHVVHGSTG TLLATDLNSL |
| 3301 | PEEDQKGLGR SLETLTAAEA TAFERNARTE SAKSTPLHKL RDVIMETPLE ITEL |

SEQ ID NO: 286
PROTOCADHERIN RELATED 15 (PCDH15)
AAK31581.1

| | |
|---|---|
| 1 | MFRQFYLWTC LASGIILGSL FEICLGQYDD DCKLARGGPP ATIVAIDEES RNGTILVDNM |
| 61 | LIKGTAGGPD PTIELSLKDN VDYWVLMDPV KQMLFLNSTG RVLDRDPPMN IHSIVVQVQC |
| 121 | INKKVGTIIY HEVRIVVRDR NDNSPTFKHE SYYATVNELT PVGTTIFTGF SGDNGATDID |
| 181 | DGPNGQIEYV IQYNPDDPTS NDTFEIPLML TGNIVLRKRL NYEDKTRYFV IIQANDRAQN |
| 241 | LNERRTTTTT LTVDVLDGDD SGPMFLPCVL VPNTRDCRPL TYQAAIPELR TPEELNPIIV |
| 301 | TPPIQAIDQD RNIQPPSDRP GILYSILVGT PEDYPRFFHM HPRTAELSLL EPVNRDFHQK |
| 361 | FDLVIKAEQD NGHPLPAFAG LHIEILDENN QSPYFTMPSY QGYILESAPV GATISDSLNL |
| 421 | TSPLRIVALD KDIEDTKDPE LHLFLNDYTS VFTVTQTGIT RYLTLLLPVD REEQQTYTFS |
| 481 | ITAFDGVQES EPVIVNIQVM DANDNTPTFP EISYDVYVYT DMRPGDSVIQ LTAVDADEGS |
| 541 | NGEITYEILV GAQGDFIINK TTGLITIAPG VEMIVGRTYA LTVQAADNAP PAERRNSICT |
| 601 | VYIEVLPPNN QSPPRFPQLM YSLEISEAMR VGAVLLNLQA TDREGDSITY AIENGDPQRV |
| 661 | FNLSETTGIL TLGKALDRES TDRYILIITA SDGRPDGTST ATVNIVVTDV NDNAPVFDPY |
| 721 | LPRNLSVVEE EANAFVGQVK ATDPDAGING QVHYSLGNFN NLFRITSNGS IYTAVKLNRE |
| 781 | VRDYYELVVV ATDGAVHPRH STLTLAIKVL DIDDNSPVFT NSTYTVLVEE NLPAGTTILQ |
| 841 | IEAKDVDLGA NVSYRIRSPE VKHFFALHPF TGELSLLRSL DYEAFPDQEA SITFLVEAFD |
| 901 | IYGTMPPGIA TVTVIVKDMN DYPPVFSKQI YKGMVAPDAV KGTPITTVYA EDADPPGLPA |
| 961 | SRVRYRVDDV QFPYPASIFE VEEDSGRVIT RVNLNEEPTT IFKLVVVAFD DGEPVMSSSA |
| 1021 | TVKILVLHPG EIPRFTQEEY RPPPVSELAT KGTMVGVISA AAINQSIVYS IVSGNEEDTF |
| 1081 | GINNITGVIY VNGPLDYETR TSYVLRVQAD SLEVVLANLR VPSKSNTAKV YIEIQDENNH |
| 1141 | PPVFQKKFYI GGVSEDARMF TSVLRVKATD KDTGNYSVMA YRLIIPPIKE GKEGFVVETY |
| 1201 | TGLIKTAMLF HNMRRSYFKF QVIATDDYGK GLSGKADVLV SVVNQLDMQV IVSNVPPTLV |
| 1261 | EKKIEDLTEI LDRYVREQIP GAKVVVESIG ARRHGDAFSL EDYTKCDLTV YAIDPQTNRA |
| 1321 | IDRNELFKFL DGKLLDINKD FQPYYGEGGR ILEIRTPEAV TSIKKRGESL GYTEGALLAL |
| 1381 | AFIIILCCIP AILVVLVSYR QFKVRQAECT KTARIQAALP AAKPAVPAPA PVAAPPPPPP |
| 1441 | PPPGAHLYEE LGDSSILFLL YHFQQSRGNN SVSEDRKHQQ VVMPFSSNTI EAHKSAHVDG |
| 1501 | SLKSNKLKSA RKFTFLSDED DLSAHNPLYK ENISQVSTNS DISQRTDFVD PFSPKIQAKS |
| 1561 | KSLRGPREKI QRLWSQSVSL PRRLMRKVPN RPEIIDLQQW QGTRQKAENE NTGICTNKRG |
| 1621 | SSNPLLTTEE ANLTEKEEIR QGETLMIEGT EQLKSLSSDS SFCFPRPHFS FSTLPTVSRT |
| 1681 | VELKSEPNVI SSPAECSLEL SPSRPCVLHS SLSRRETPIC MLPIETERNI FENFAHPPNI |
| 1741 | SPSACPLPPP PPISPPSPPP APAPLAPPPD ISPFSLFCPP PSPPSIPLPL PPPTFFPLSV |
| 1801 | STSGPPTPPL LPPFPTPLPP PPPSIPCPPP PSASFLSTEC VCITGVKCTT NLMPAEKIKS |
| 1861 | SMTQLSTTTV CKTDPQREPK GILRHVKNLA ELEKSVANMY SQIEKNYLRT NVSELQTMCP |
| 1921 | SEVTNMEITS EQNKGSLNNI VEGTEKQSHS QSTSL |

SEQ ID NO: 287
PROTOCADHERIN RELATED 15 (PCDH15), ISOFORM CRA A
EAW54151.1

| | |
|---|---|
| 1 | MFRQFYLWTC LASGIILGSL FEICLGQYDD DCKLARGGPP ATIVAIDEES RNGTILVDNM |
| 61 | LIKGTAGGPD PTIELSLKDN VDYWVLMDPV KQMLFLNSTG RVLDRDPPMN IHSIVVQVQC |
| 121 | INKKVGTIIY HEVRIVVRDR NDNSPTFKHE SYYATVNELT PVGTTIFTGF SGDNGATDID |
| 181 | DGPNGQIEYV IQYNPDDPTS NDTFEIPLML TGNIVLRKRL NYEDKTRYFV IIQANDRAQN |
| 241 | LNERRTTTTT LTVDVLDGDD LGPMFLPCVL VPNTRDCRPL TYQAAIPELR TPEELNPIIV |
| 301 | TPPIQAIDQD RNIQPPSDRP GILYSILVGT PEDYPRFFHM HPRTAELSLL EPVNRDFHQK |
| 361 | FDLVIKAEQD NGHPLPAFAG LHIEILDENN QSPYFTMPSY QGYILESAPV GATISDSLNL |
| 421 | TSPLRIVALD KDIEDTKDPE LHLFLNDYTS VFTVTQTGIT RYLTLLQPVD REEQQTYTFS |
| 481 | ITAFDGVQES EPVIVNIQVM DANDNTPTFP EISYDVYVYT DMRPGDSVIQ LTAVDADEGS |
| 541 | NGEITYEILV GAQGDFIINK TTGLITIAPG VEMIVGRTYA LTVQAADNAP PAERRNSICT |
| 601 | VYIEVLPPNN QSPPRFPQLM YSLEISEAMR VGAVLLNLQA TDREGDSITY AIENGDPQRV |
| 661 | FNLSETTGIL TLGKALDRES TDRYILIITA SDGRPDGTST ATVNIVVTDV NDNAPVFDPY |
| 721 | LPRNLSVVEE EANAFVGQVK ATDPDAGING QVHYSLGNFN NLFRITSNGS IYTAVKLNRE |
| 781 | VRDYYELVVV ATDGAVHPRH STLTLAIKVL DIDDNSPVFT NSTYTVLVEE NLPAGTTILQ |
| 841 | IEAKDVDLGA NVSYRIRSPE VKHFFALHPF TGELSLLRSL DYEAFPDQEA SITFLVEAFD |
| 901 | IYGTMPPGIA TVTVIVKDMN DYPPVFSKRI YKGMVAPDAV KGTPITTVYA EDADPPGLPA |
| 961 | SRVRYRVDDV QFPYPASIFE VEEDSGRVIT RVNLNEEPTT IFKLVVVAFD DGEPVMSSSA |
| 1021 | TVKILVLHPG EIPRFTQEEY RPPPVSELAT KGTMVGVISA AAINQSIVYS IVSGNEEDTF |
| 1081 | GINNITGVIY VNGPLDYETR TSYVLRVQAD SLEVVLANLR VPSKSNTAKV YIEIQDENNH |
| 1141 | PPVFQKKFYI GGVSEDARMF TSVLRVKATD KDTGNYSVMA YRLIIPPIKE GKEGFVVETY |
| 1201 | TGLIKTAMLF HNMRRSYFKF QVIATDDYGK GLSGKADVLV SVVNQLDMQV IVSNVPPTLV |
| 1261 | EKKIEDLTEI LDRYVQEQIP GAKVVVESIG ARRHGDAFSL EDYTKCDLTV YAIDPQTNRA |
| 1321 | IDRNELFKFL DGKLLDINKD FQPYYGEGGR ILEIRTPEAV TSIKKRGESL GYTEGALLAL |
| 1381 | AFIIILCCIP AILVVLVSYR Q |

SEQ ID NO: 288
PROTOCADHERIN RELATED 15 (PCDH15), ISOFORM X1
XP_016872062.1

| | |
|---|---|
| 1 | MFRQFYLWTC LASGIILGSL FEICLGQYDD DWQYEDCKLA RGGPPATIVA IDEESRNGTI |
| 61 | LVDNMLIKGT AGGPDPTIEL SLKDNVDYWV LMDPVKQMLF LNSTGRVLDR DPPMNIHSIV |
| 121 | VQVQCINKKV GTIIYHEVRI VVRDRNDNSP TFKHESYYAT VNELTPVGTT IFTGFSGDNG |
| 181 | ATDIDDGPNG QIEYVIQYNP DDPTSNDTFE IPLMLTGNIV LRKRLNYEDK TRYFVIIQAN |
| 241 | DRAQNLNERR TTTTTLTVDV LDGDDLGPMF LPCVLVPNTR DCRPLTYQAA IPELRTPEEL |
| 301 | NPIIVTPPIQ AIDQDRNIQP PSDRPGILYS ILVGTPEDYP RFFHMHPRTA ELSLLEPVNR |
| 361 | DFHQKFDLVI KAEQDNGHPL PAFAGLHIEI LDENNQSPYF TMPSYQGYIL ESAPVGATIS |
| 421 | DSLNLTSPLR IVALDKDIED TKDPELHLFL NDYTSVFTVT QTGITRYLTL LQPVDREEQQ |
| 481 | TYTFSITAFD GVQESEPVIV NIQVMDANDN TPTFPEISYD VYVYTDMRPG DSVIQLTAVD |
| 541 | ADEGSNGEIT YEILVGAQGD FIINKTTGLI TIAPGVEMIV GRTYALTVQA ADNAPPAERR |
| 601 | NSICTVYIEV LPPNNQSPPR FPQLMYSLEI SEAMRVGAVL LNLQATDREG DSITYAIENG |
| 661 | DPQRVFNLSE TTGILTLGKA LDRESTDRYI LIITASDGRP DGTSTATVNI VVTDVNDNAP |
| 721 | VFDPYLPRNL SVVEEEANAF VGQVKATDPD AGINGQVHYS LGNFNNLFRI TSNGSIYTAV |
| 781 | KLNREVRDYY ELVVVATDGA VHPRHSTLTL AIKVLDIDDN SPVFTNSTYT VLVEENLPAG |
| 841 | TTILQIEAKD VDLGANVSYR IRSPEVKHFF ALHPFTGELS LLRSLDYEAF PDQEASITFL |
| 901 | VEAFDIYGTM PPGIATVTVI VKDMNDYPPV FSKRIYKGMV APDAVKGTPI TTVYAEDADP |
| 961 | PGLPASRVRY RVDDVQFPYP ASIFEVEEDS GRVITRVNLN EEPTTIFKLV VVAFDDGEPV |
| 1021 | MSSSATVKIL VLHPGEIPRF TQEEYRPPPV SELATKGTMV GVISAAAINQ SIVYSIVSGN |
| 1081 | EEDTFGINNI TGVIYVNGPL DYETRTSYVL RVQADSLEVV LANLRVPSKS NTAKVYIEIQ |
| 1141 | DENNHPPVFQ KKFYIGGVSE DARMFTSVLR VKATDKDTGN YSVMAYRLII PPIKEGKEGF |
| 1201 | VVETYTGLIK TAMLFHNMRR SYFKFQVIAT DDYGKGLSGK ADVLVSVVNQ LDMQVIVSNV |
| 1261 | PPTLVEKKIE DLTEILDRYV QEQIPGAKVV VESIGARRHG DAFSLEDYTK CDLTVYAIDP |
| 1321 | QTNRAIDRNE LFKFLDGKLL DINKDFQPYY GEGGRILEIR TPEAVTSIKK RGESLGYTEG |
| 1381 | ALLALAFIII LCCIPAILVV LVSYRQFKVR QAECTKTARI QAALPAAKPA VPAPAPVAAP |
| 1441 | PPPPPPPPGA HLYEELGDSS MHKYEMPQYG SRRRLLPPAG QEEYGEVVGE AEEEYEEEEE |
| 1501 | EPKKIKKPKV EIREPSEEEE VVVTIEKPPA AEPTYTTWKR ARIFPMIFKK VRGLADKRGI |
| 1561 | VDLEGEEWQR RLEEEDKDYL KLTLDQEEAT ESTVESEEES SSDYTEYSEE ESEFSESETT |
| 1621 | EEESESETPS EEEESSTPES EESESTESEG EKARKNIVLA RRRPMVEEVK EVKGRKEEPQ |
| 1681 | EEQKEPKMEE EEHSEEEESG PAPVEESTDP EAQDIPEEGS AESASVEGGV ESEEESESGS |
| 1741 | SSSSSESQSG GPWGYQVPAY DRSKNANQKK SPGANSEGYN TAL |

SEQ ID NO: 289
USHERIN (USH2A), ISOFORM A
NP_009054.5

| | |
|---|---|
| 1 | MNCPVLSLGS GFLFQVIEML IFAYFASISL TESRGLFPRL ENVGAFKKVS IVPTQAVCGL |
| 61 | PDRSTFCHSS AAAESIQFCT QRFCIQDCPY RSSHPTYTAL FSAGLSSCIT PDKNDLHPNA |
| 121 | HSNSASFIFG NHKSCFSSPP SPKLMASFTL AVWLKPEQQG VMCVIEKTVD GQIVFKLTIS |
| 181 | EKETMFYYRT VNGLQPPIKV MTLGRILVKK WIHLSVQVHQ TKISFFINGV EKDHTPFNAR |
| 241 | TLSGSITDFA SGTVQIGQSL NGLEQFVGRM QDFRLYQVAL TNREILEVFS GDLLRLHAQS |
| 301 | HCRCPGSHPR VHPLAQRYCI PNDAGDTADN RVSRLNPEAH PLSFVNDNDV GTSWVSNVFT |
| 361 | NITQLNQGVT ISVDLENGQY QVFYIIIQFF SPQPTEIRIQ RKKENSLDWE DWQYFARNCG |
| 421 | AFGMKNNGDL EKPDSVNCLQ LSNFTPYSRG NVTFSILTPG PNYRPGYNNF YNTPSLQEFV |
| 481 | KATQIRFHFH GQYYTTETAV NLRHRYYAVD EITISGRCQC HGHADNCDTT SQPYRCLCSQ |
| 541 | ESFTEGLHCD RCLPLYNDKP FRQGDQVYAF NCKPCQCNSH SKSCHYNISV DPFPFEHFRG |
| 601 | GGGVCDDCEH NTTGRNCELC KDYFFRQVGA DPSAIDVCKP CDCDTVGTRN GSILCDQIGG |
| 661 | QCNCKRHVSG RQCNQCQNGF YNLQELDPDG CSPCNCNTSG TVDGDITCHQ NSGQCKCKAN |
| 721 | VIGLRCDHCN FGFKFLRSFN DVGCEPCQCN LHGSVNKFCN PHSGQCECKK EAKGLQCDTC |
| 781 | RENFYGLDVT NCKACDCDTA GSLPGTVCNA KTGQCICKPN VEGRQCNKCL EGNFYLRQNN |
| 841 | SFLCLPCNCD KTGTINGSLL CNKSTGQCPC KLGVTGLRCN QCEPHRYNLT IDNFQHCQMC |
| 901 | ECDSLGTLPG TICDPISGQC LCVPNRQGRR CNQCQPGFYI SPGNATGCLP CSCHTTGAVN |
| 961 | HICNSLTGQC VCQDASIAGQ RCDQCKDHYF GFDPQTGRCQ PCNCHLSGAL NETCHLVTGQ |
| 1021 | CFCKQFVTGS KCDACVPSAS HLDVNNLLGC SKTPFQQPPP RGQVQSSSAI NLSWSPPDSP |
| 1081 | NAHWLTYSLL RDGFEIYTTE DQYPYSIQYF LDTDLLPYTK YSYYIETTNV HGSTRSVAVT |
| 1141 | YKTKPGVPEG NLTLSYIIPI GSDSVTLTWT TLSNQSGPIE KYILSCAPLA GGQPCVSYEG |
| 1201 | HETSATIWNL VPFAKYDFSV QACTSGGCLH SLPITVTTAQ APPQRLSPPK MQKISSTELH |
| 1261 | VEWSPPAELN GIIIRYELYM RRLRSTKETT SEESRVFQSS GWLSPHSFVE SANENALKPP |
| 1321 | QTMTTITGLE PYTKYEFRVL AVNMAGSVSS AWVSERTGES APVFMIPPSV FPLSSYSLNI |
| 1381 | SWEKPADNVT RGKVVGYDIN MLSEQSPQQS IPMAFSQLLH TAKSQELSYT VEGLKPYRIY |
| 1441 | EFTITLCNSV GCVTSASGAG QTLAAAPAQL RPPLVKGINS TTIHLKWFPP EELNGPSPIY |
| 1501 | QLERRESSLP ALMTTMMKGI RFIGNGYCKF PSSTHPVNTD FTGKCV |

SEQ ID NO: 290
USHERIN (USH2A), ISOFORM B PRECURSOR
NP_996816.2

| | |
|---|---|
| 1 | MNCPVLSLGS GFLFQVIEML IFAYFASISL TESRGLFPRL ENVGAFKKVS IVPTQAVCGL |
| 61 | PDRSTFCHSS AAAESIQFCT QRFCIQDCPY RSSHPTYTAL FSAGLSSCIT PDKNDLHPNA |
| 121 | HSNSASFIFG NHKSCFSSPP SPKLMASFTL AVWLKPEQQG VMCVIEKTVD GQIVFKLTIS |
| 181 | EKETMFYYRT VNGLQPPIKV MTLGRILVKK WIHLSVQVHQ TKISFFINGV EKDHTPFNAR |
| 241 | TLSGSITDFA SGTVQIGQSL NGLEQFVGRM QDFRLYQVAL TNREILEVFS GDLLRLHAQS |
| 301 | HCRCPGSHPR VHPLAQRYCI PNDAGDTADN RVSRLNPEAH PLSFVNDNDV GTSWVSNVFT |
| 361 | NITQLNQGVT ISVDLENGQY QVFYIIIQFF SPQPTEIRIQ RKKENSLDWE DWQYFARNCG |
| 421 | AFGMKNNGDL EKPDSVNCLQ LSNFTPYSRG NVTFSILTPG PNYRPGYNNF YNTPSLQEFV |
| 481 | KATQIRFHFH GQYYTTETAV NLRHRYYAVD EITISGRCQC HGHADNCDTT SQPYRCLCSQ |
| 541 | ESFTEGLHCD RCLPLYNDKP FRQGDQVYAF NCKPCQCNSH SKSCHYNISV DPFPFEHFRG |
| 601 | GGGVCDDCEH NTTGRNCELC KDYFFRQVGA DPSAIDVCKP CDCDTVGTRN GSILCDQIGG |
| 661 | QCNCKRHVSG RQCNQCQNGF YNLQELDPDG CSPCNCNTSG TVDGDITCHQ NSGQCKCKAN |
| 721 | VIGLRCDHCN FGFKFLRSFN DVGCEPCQCN LHGSVNKFCN PHSGQCECKK EAKGLQCDTC |
| 781 | RENFYGLDVT NCKACDCDTA GSLPGTVCNA KTGQCICKPN VEGRQCNKCL EGNFYLRQNN |
| 841 | SFLCLPCNCD KTGTINGSLL CNKSTGQCPC KLGVTGLRCN QCEPHRYNLT IDNFQHCQMC |
| 901 | ECDSLGTLPG TICDPISGQC LCVPNRQGRR CNQCQPGFYI SPGNATGCLP CSCHTTGAVN |
| 961 | HICNSLTGQC VCQDASIAGQ RCDQCKDHYF GFDPQTGRCQ PCNCHLSGAL NETCHLVTGQ |
| 1021 | CFCKQFVTGS KCDACVPSAS HLDVNNLLGC SKTPFQQPPP RGQVQSSSAI NLSWSPPDSP |
| 1081 | NAHWLTYSLL RDGFEIYTTE DQYPYSIQYF LDTDLLPYTK YSYYIETTNV HGSTRSVAVT |
| 1141 | YKTKPGVPEG NLTLSYIIPI GSDSVTLTWT TLSNQSGPIE KYILSCAPLA GGQPCVSYEG |
| 1201 | HETSATIWNL VPFAKYDFSV QACTSGGCLH SLPITVTTAQ APPQRLSPPK MQKISSTELH |
| 1261 | VEWSPPAELN GIIIRYELYM RRLRSTKETT SEESRVFQSS GWLSPHSFVE SANENALKPP |
| 1321 | QTMTTITGLE PYTKYEFRVL AVNMAGSVSS AWVSERTGES APVFMIPPSV FPLSSYSLNI |
| 1381 | SWEKPADNVT RGKVVGYDIN MLSEQSPQQS IPMAFSQLLH TAKSQELSYT VEGLKPYRIY |
| 1441 | EFTITLCNSV GCVTSASGAG QTLAAAPAQL RPPLVKGINS TTIHLKWFPP EELNGPSPIY |
| 1501 | QLERRESSLP ALMTTMMKGI RFIGNGYCKF PSSTHPVNTD FTGIKASFRT KVPEGLIVFA |
| 1561 | ASPGNQEEYF ALQLKKGRLY FLFDPQGSPV EVTTTNDHGK QYSDGKWHEI IAIRHQAFGQ |
| 1621 | ITLDGIYTGS SAILNGSTVI GDNTGVFLGG LPRSYTILRK DPEIIQKGFV GCLKDVHFMK |
| 1681 | NYNPSAIWEP LDWQSSEEQI NVYNSWEGCP ASLNEGAQFL GAGFLELHPY MFHGGMNFEI |
| 1741 | SFKFRTDQLN GLLLFVYNKD GPDFLAMELK SGILTFRLNT SLAFTQVDLL LGLSYCNGKW |
| 1801 | NKVIIKKEGS FISASVNGLM KHASESGDQP LVVNSPVYVG GIPQELLNSY QHLCLEQGFG |
| 1861 | GCMKDVKFTR GAVVNLASVS SGAVRVNLDG CLSTDSAVNC RGNDSILVYQ GKEQSVYEGG |
| 1921 | LQPFTEYLYR VIASHEGGSV YSDWSRGRTT GAAPQSVPTP SRVRSLNGYS IEVTWDEPVV |
| 1981 | RGVIEKYILK AYSEDSTRPP RMPSASAEFV NTSNLTGILT GLLPFKNYAV TLTACTLAGC |
| 2041 | TESSHALNIS TPQEAPQEVQ PPVAKSLPSS LLLSWNPPKK ANGIITQYCL YMDGRLIYSG |
| 2101 | SEENYTVTDL AVFTPHQFLL SACTHVGCTN SSWVLLYTAQ LPPEHVDSPV LTVLDSRTIH |
| 2161 | IQWKQPRKIS GILERYVLYM SNHTHDFTIW SVIYNSTELF QDHMLQYVLP GNKYLIKLGA |
| 2221 | CTGGGCTVSE ASEALTDEDI PEGVPAPKAH SYSPDSFNVS WTEPEYPNGV ITSYGLYLDG |
| 2281 | ILIHNSSELS YRAYGFAPWS LHSFRVQACT AKGCALGPLV ENRTLEAPPE GTVNVFVKTQ |
| 2341 | GSRKAHVRWE APFRPNGLLT HSVLFTGIFY VDPVGNNYTL LNVTKVMYSG EETNLWVLID |
| 2401 | GLVPFTNYTV QVNISNSQGS LITDPITIAM PPGAPDGVLP PRLSSATPTS LQVVWSTPAR |
| 2461 | NNAPGSPRYQ LQMRSGDSTH GFLELFSNPS ASLSYEVSDL QPYTEYMFRL VASNGFGSAH |
| 2521 | SSWIPFMTAE DKPGPVVPPI LLDVKSRMML VTWQHPRKSN GVITHYNIYL HGRLYLRTPG |
| 2581 | NVTNCTVMHL HPYTAYKFQV EACTSKGCSL SPESQTVWTL PGAPEGIPSP ELFSDTPTSV |
| 2641 | IISWQPPTHP NGLVENFTIE RRVKGKEEVT TLVTLPRSHS MRFIDKTSAL SPWTKYEYRV |
| 2701 | LMSTLHGGTN SSAWVEVTTR PSRPAGVQPP VVTVLEPDAV QVTWKPPLIQ NGDILSYEIH |
| 2761 | MPDPHITLTN VTSAVLSQKV THLIPFTNYS VTIVACSGGN GYLGGCTESL PTYVTTHPTV |
| 2821 | PQNVGPLSVI PLSESYVVIS WQPPSKPNGP NLRYELLRRK IQQPLASNPP EDLNRWHNIY |
| 2881 | SGTQWLYEDK GLSRFTTYEY MLFVHNSVGF TPSREVTVTT LAGLPERGAN LTASVLNHTA |
| 2941 | IDVRWAKPTV QDLQGEVEYY TLFWSSATSN DSLKILPDVN SHVIGHLKPN TEYWIFISVF |
| 3001 | NGVHSINSAG LHATTCDGEP QGMLPPEVVI INSTAVRVIW TSPSNPNGVV TEYSIYVNNK |
| 3061 | LYKTGMNVPG SFILRDLSPF TIYDIQVEVC TIYACVKSNG TQITTVEDTP SDIPTPTIRG |
| 3121 | ITSRSLQIDW VSPRKPNGII LGYDLLWKTW YPCAKTQKLV QDQSDELCKA VRCQKPESIC |
| 3181 | GHICYSSEAK VCCNGVLYNP KPGHRCCEEK YIPFVLNSTG VCCGGRIQEA QPNHQCCSGY |
| 3241 | YARILPGEVC CPDEQHNRVS VGIGDSCCGR MPYSTSGNQI CCAGRLHDGH GQKCCGRQIV |
| 3301 | SNDLECCGGE EGVVYNRLPG MFCCGQDYVN MSDTICCSAS SGESKAHIKK NDPVPVKCCE |
| 3361 | TELIPKSQKC CNGVGYNPLK YVCSDKISTG MMMKETKECR ILCPASMEAT EHCGRCDFNF |
| 3421 | TSHICTVIRG SHNSTGKASI EEMCSSAEET IHTGSVNTYS YTDVNLKPYM TYEYRISAWN |
| 3481 | SYGRGLSKAV RARTKEDVPQ GVSPPTWTKI DNLEDTIVLN WRKPIQSNGP IIYYILLRNG |
| 3541 | IERFRGTSLS FSDKEGIQPF QEYSYQLKAC TVAGCATSSK VVAATTQGVP ESILPPSITA |
| 3601 | LSAVALHLSW SVPEKSNGVI KEYQIRQVGK GLIHTDTTDR RQHTVTGLQP YTNYSFTLTA |
| 3661 | CTSAGCTSSE PFLGQTLQAA PEGVWVTPRH IIINSTTVEL YWSLPEKPNG LVSQYQLSRN |
| 3721 | GNLLFLGGSE EQNFTDKNLE PNSRYTYKLE VKTGGGSSAS DDYIVQTPMS TPEEIYPPYN |
| 3781 | ITVIGPYSIF VAWIPPGILI PEIPVEYNVL LNDGSVTPLA FSVGHHQSTL LENLTPFTQY |
| 3841 | EIRIQACQNG SCGVSSRMFV KTPEAAPMDL NSPVLKALGS ACIEIKWMPP EKPNGIIINY |
| 3901 | FIYRRPAGIE EESVLFVWSE GALEFMDEGD TLRPFTLYEY RVRACNSKGS VESLWSLTQT |
| 3961 | LEAPPQDFPA PWAQATSAHS VLLNWTKPES PNGIISHYRV VYQERPDDPT FNSPTVHAFT |
| 4021 | VKGTSHQAHL YGLEPFTTYR IGVVAANHAG EILSPWTLIQ TLESSPSGLR NFIVEQKENG |
| 4081 | RALLLQWSEP MRTNGVIKTY NIFSDGFLEY SGLNRQFLFR RLDPFTLYTL TLEACTRAGC |
| 4141 | AHSAPQPLWT DEAPPDSQLA PTVHSVKSTS VELSWSEPVN PNGKIIRYEV IRRCFEGKAW |
| 4201 | GNQTIQADEK IVFTEYNTER NTFMYNDTGL QPWTQCEYKI YTWNSAGHTC SSWNVVRTLQ |
| 4261 | APPEGLSPPV ISYVSMNPQK LLISWIPPEQ SNGIIQSYRL QRNEMLYPFS FDPVTFNYTD |
| 4321 | EELLPFSTYS YALQACTSGG CSTSKPTSIT TLEAAPSEVS PPDLWAVSAT QMNVCWSPPT |
| 4381 | VQNGKITKYL VRYDNKESLA GQGLCLLVSH LQPYSQYNFS LVACTNGGCT ASVSKSAWTM |
| 4441 | EALPENMDSP TLQVTGSESI EITWKPPRNP NGQIRSYELR RDGTIVYTGL ETRYRDFTLT |
| 4501 | PGVEYSYTVT ASNSQGGILS PLVKDRTSPS APSGMEPPKL QARGPQEILV NWDPPVRTNG |
| 4561 | DIINYTLFIR ELFERETKII HINTTHNSFG MQSYIVNQLK PFHRYEIRIQ ACTTLGCASS |
| 4621 | DWTFIQTPEI APLMQPPPHL EVQMAPGGFQ PTVSLLWTGP LQPNGKVLYY ELYRRQIATQ |
| 4681 | PRKSNPVLIY NGSSTSFIDS ELLPFTEYEY QVWAVNSAGK APSSWTWCRT GPAPPEGLRA |
| 4741 | PTFHVISSTQ AVVNISAPGK PNGIVSLYRL FSSSAHGAET VLSEGMATQQ TLHGLQAFTN |
| 4801 | YSIGVEACTC FNCCSKGPTA ELRTHPAPPS GLSSPQIGTL ASRTASFRWS PPMFPNGVIH |
| 4861 | SYELQFHVAC PPDSALPCTP SQIETKYTGL GQKASLGGLQ PYTTYKLRVV AHNEVGSTAS |
| 4921 | EWISFTTQKE LPQYRAPFSV DSNLSVVCVN WSDTFLLNGQ LKEYVLTDGG RRVYSGLDTT |
| 4981 | LYIPRTADKT FFFQVICTTD EGSVKTPLIQ YDTSTGLGLV LTTPGKKKGS RSKSTEFYSE |
| 5041 | LWFIVLMAML GLILLAIFLS LILQRKIHKE PYIRERPPLV PLQKRMSPLN VYPPGENHMG |
| 5101 | LADTKIPRSG TPVSIRSNRS ACVLRIPSQN QTSLTYSQGS LHRSVSQLMD IQDKKVLMDN |
| 5161 | SLWEAIMGHN SGLYVDEEDL MNAIKDFSSV TKERTTFTDT HL |

SEQ ID NO: 291
USHERIN (USH2A), TYPE IIA
AAC23748.2

| | |
|---|---|
| 1 | MNCPVLSLGS GFLFQVIEML IFAYFASISL TESRGLFPRL ENVGAFKKVS IVPTQAVCGL |
| 61 | PDRSTFCHSS AAAESIQFCT QRFCIQDCPY RSSHPTYTAL FSAGLSSCIT PDKNDLHPNA |
| 121 | HSNSASFIFG NHKSCFSSPP SPKLMASFTL AVWLKPEQQG VMCVIEKTVD GQIVFKLTIS |
| 181 | EKETMFYYRT VNGLQPPIKV MTLGRILVKK WIHLSVQVHQ TKISFFINGV EKDHTPFNAR |
| 241 | TLSGSITDFA SGTVQIGQSL NGLEQFVGRM QDFRLYQVAL TNREILEVFS GDLLRLHAQS |
| 301 | HCRCPGSHPR VHPLAQRYCI PNDAGDTADN RVSRLNPEAH PLSFVNDNDV GTSWVSNVFT |
| 361 | NITQLNQGVT ISVDLENGQY QVFYIIIQFF SPQPTEIRIQ RKKENSLDWE DWQYFARNCG |
| 421 | AFGMKNNGDL EKPDSVNCLQ LSNFTPYSRG NVTFSILTPG PNYRPGYNNF YNTPSLQESV |
| 481 | KATQIRFHFH GQYYTTETAV NLRHRYYAVD EITISGRCQC HGHADNCDTT SQPYRCLCSQ |
| 541 | ESFTEGLHCD RCLPLYNDKP FRQGDQVYAF NCKPCQCNSH SKSCHYNISV DPFPFEHFRG |
| 601 | GGGVCDDCEH NTTGRNCELC KDYFFRQVGA DPSAIDVCKP CDCDTVGTRN GSILCDQIGG |
| 661 | QCNCKRHVSG RQCNQCQNGF YNLQELDPDG CSPCNCNTSG TVDGDITCHQ NSGQCKCKAN |
| 721 | VIGLRCDHCN FGFKFLRSFN DVGCEPCQCN LHGSVNKFCN PHSGQCECKK EAKGLQCDTC |
| 781 | RENFYGLDVT NCKACDCDTA GSLPGTVCNA KTGQCICKPN VEGRQCNKCL EGNFYLRQNN |
| 841 | SFLCLPCNCD KTGTINGSLL CNKSTGQCPC KLGVTGLRCN QCEPHRYNLT IDNFQHCQMC |
| 901 | ECDSLGTLPG TICDPISGQC LCVPNRQGRR CNQCQPGFYI SPGNATGCLP CSCHTTGAVN |
| 961 | HICNSLTGQC VCQDASIAGQ RCDQCKDHYF GFDPQTGRCQ PCNCHLSGAL NETCHLVTGQ |
| 1021 | CFCKQFVTGS KCDACVPSAS HLDVNNLLGC SKTPFQQPPP RGQVQSSSAI NLSWSPPDSP |
| 1081 | NAHWLTYSLL RDGFEIYTTE DQYPYSIQYF LDTDLLPYTK YSYYIETTNV HGSTRSVAVT |
| 1141 | YKTKPGVPEG NLTLSYIIPI GSDSVTLTWT TLSNQSGPIE KYILSCAPLA GGQPCVSYEG |
| 1201 | HETSATIWNL VPFAKYDFSV QACTSGGCLH SLPITVTTAQ APPQRLSPPK MQKISSTELH |
| 1261 | VEWSPPAELN GIIIRYELYM RRLRSTKETT SEESRVFQSS GWLSPHSFVE SANENALKPP |
| 1321 | QTMTTITGLE PYTKYEFRVL AVNMAGSVSS AWVSERTGES APVFMIPPSV FPLSSYSLNI |
| 1381 | SWEKPADNVT RGKVVGYDIN MLSEQSPQQS IPMAFSQLLH TAKSQELSYT VEGLKPYRIY |
| 1441 | EFTITLCNSV GCVTSASGAG QTLAAAPAQL RPPLVKGINS TTIHLKWFPP EELNGPSPIY |
| 1501 | QLERRESSLP ALMTIMMKGI RFIGNGYCKF PSSTHPVNTD FTGKCV |

SEQ ID NO: 292
CLARIN 1 (CLRN1)
AAH74971.1

| | |
|---|---|
| 1 | MPSQQKKIIF CMAGVFSFAC ALGVVTALGT PLWIKATVLC KTGALLVNAS GQELDKFMGE |
| 61 | MQYGLFHGEG VRQCGLGARP FRFSFFPDLL KAIPVSIHVN VILFSAILIV LTMVGTAFFM |
| 121 | YNAFGKPFET LHGPLGLYLL SFISGSCGCL VMILFASEVK IHHLSEKIAN YKEGTYVYKT |
| 181 | QSEKYTTSFW VIFFCFFVHF LNGLLIRLAG FQFPFAKSKD AETTNVAADL MY |

SEQ ID NO: 293
CLARIN 1 (CLRN1), ISOFORM A
NP_777367.1

| | |
|---|---|
| 1 | MPSQQKKIIF CMAGVFSFAC ALGVVTALGT PLWIKATVLC KTGALLVNAS GQELDKFMGE |
| 61 | MQYGLFHGEG VRQCGLGARP FRFSFFPDLL KAIPVSIHVN VILFSAILIV LTMVGTAFFM |
| 121 | YNAFGKPFET LHGPLGLYLL SFISGSCGCL VMILFASEVK IHHLSEKIAN YKEGTYVYKT |
| 181 | QSEKYTTSFW VIFFCFFVHF LNGLLIRLAG FQFPFAKSKD AETTNVAADL MY |

SEQ ID NO: 294
CLARIN 1 (CLRN1), ISOFORM D
NP_001182723.1

| | |
|---|---|
| 1 | MPSQQKKIIF CMAGVFSFAC ALGVVTALGT PLWIKATVLC KTGALLVNAS GQELDKFMGE |
| 61 | MQYGLFHGEG VRQCGLGARP FRFSFFPDLL KAIPVSIHVN VILFSAILIV LTMVGTAFFM |
| 121 | YNAFGKPFET LHGPLGLYLL SFISVALWLP ATRHQAQGSC GCLVMILFAS EVKIHHLSEK |
| 181 | IANYKEGTYV YKTQSEKYTT SFWVIFFCFF VHFLNGLLIR LAGFQFPFAK SKDAETTNVA |
| 241 | ADLMY |

SEQ ID NO: 295
CLARIN 1 (CLRN1), ISOFORM C
NP_443721.1

| | |
|---|---|
| 1 | MQALQQQPVF PDLLKAIPVS IHVNVILFSA ILIVLTMVGT AFFMYNAFGK PFETLHGPLG |
| 61 | LYLLSFISGS CGCLVMILFA SEVKIHHLSE KIANYKEGTY VYKTQSEKYT TSFWLTKGHS |

SEQ ID NO: 296
CLARIN 1 (CLRN1), ISOFORM E
NP_001243748.1

| | |
|---|---|
| 1 | MPSQQKKIIF CMAGVFSFAC ALGVVTALGT PLWIKATVLC KTGALLVNAS GQELDKFMGE |
| 61 | MQYGLFHGEG VRQCGLGARP FRFSCYFLDP FMGLPTGVPH LLSLPCSTSC RREHTSERVQ |
| 121 | EPAGCFSAVR SKLHAGPAAA TSFSRFAQSN PSEHPRQCHS LLCHPYCVNH GGDSLLHVQC |
| 181 | FWKTF |

SEQ ID NO: 297
ATP BINDING CASSETTE SUBFAMILY A MEMBER 4 (ABCA4)
P78363.3

| | |
|---|---|
| 1 | MGFVRQIQLL LWKNWTLRKR QKIRFVVELV WPLSLFLVLI WLRNANPLYS HHECHFPNKA |
| 61 | MPSAGMLPWL QGIFCNVNNP CFQSPTPGES PGIVSNYNNS ILARVYRDFQ ELLMNAPESQ |
| 121 | HLGRIWTELH ILSQFMDTLR THPERIAGRG IRIRDILKDE ETLTLFLIKN IGLSDSVVYL |
| 181 | LINSQVRPEQ FAHGVPDLAL KDIACSEALL ERFIIFSQRR GAKTVRYALC SLSQGTLQWI |
| 241 | EDTLYANVDF FKLFRVLPTL LDSRSQGINL RSWGGILSDM SPRIQEFIHR PSMQDLLWVT |
| 301 | RPLMQNGGPE TFTKLMGILS DLLCGYPEGG GSRVLSFNWY EDNNYKAFLG IDSTRKDPIY |
| 361 | SYDRRTTSFC NALIQSLESN PLTKIAWRAA KPLLMGKILY TPDSPAARRI LKNANSTFEE |
| 421 | LEHVRKLVKA WEEVGPQIWY FFDNSTQMNM IRDTLGNPTV KDFLNRQLGE EGITAEAILN |
| 481 | FLYKGPRESQ ADDMANFDWR DIFNITDRTL RLVNQYLECL VLDKFESYND ETQLTQRALS |
| 541 | LLEENMFWAG VVFPDMYPWT SSLPPHVKYK IRMDIDVVEK TNKIKDRYWD SGPRADPVED |
| 601 | FRYIWGGFAY LQDMVEQGIT RSQVQAEAPV GIYLQQMPYP CFVDDSFMII LNRCFPIFMV |
| 661 | LAWIYSVSMT VKSIVLEKEL RLKETLKNQG VSNAVIWCTW FLDSFSIMSM SIFLLTIFIM |
| 721 | HGRILHYSDP FILFLFLLAF STATIMLCFL LSTFFSKASL AAACSGVIYF TLYLPHILCF |
| 781 | AWQDRMTAEL KKAVSLLSPV AFGFGTEYLV RFEEQGLGLQ WSNIGNSPTE GDEFSFLLSM |
| 841 | QMMLLDAAVY GLLAWYLDQV FPGDYGTPLP WYFLLQESYW LGGEGCSTRE ERALEKTEPL |
| 901 | TEETEDPEHP EGIHDSFFER EHPGWVPGVC VKNLVKIFEP CGRPAVDRLN ITFYENQITA |
| 961 | FLGHNGAGKT TTLSILTGLL PPTSGTVLVG GRDIETSLDA VRQSLGMCPQ HNILFHHLTV |
| 1021 | AEHMLFYAQL KGKSQEEAQL EMEAMLEDTG LHHKRNEEAQ DLSGGMQRKL SVAIAFVGDA |
| 1081 | KVVILDEPTS GVDPYSRRSI WDLLLKYRSG RTIIMSTHHM DEADLLGDRI AIIAQGRLYC |
| 1141 | SGTPLFLKNC FGTGLYLTLV RKMKNIQSQR KGSEGTCSCS SKGFSTTCPA HVDDLTPEQV |
| 1201 | LDGDVNELMD VVLHHVPEAK LVECIGQELI FLLPNKNFKH RAYASLFREL EETLADLGLS |
| 1261 | SFGISDTPLE EIFLKVTEDS DSGPLFAGGA QQKRENVNPR HPCLGPREKA GQTPQDSNVC |
| 1321 | SPGAPAAHPE GQPPPEPECP GPQLNTGTQL VLQHVQALLV KRFQHTIRSH KDFLAQIVLP |
| 1381 | ATFVFLALML SIVIPPFGEY PALTLHPWIY GQQYTFFSMD EPGSEQFTVL ADVLLNKPGF |
| 1441 | GNRCLKEGWL PEYPCGNSTP WKTPSVSPNI TQLFQKQKWT QVNPSPSCRC STREKLTMLP |
| 1501 | ECPEGAGGLP PPQRTQRSTE ILQDLTDRNI SDFLVKTYPA LIRSSLKSKF WVNEQRYGGI |
| 1561 | SIGGKLPVVP ITGEALVGFL SDLGRIMNVS GGPITREASK EIPDFLKHLE TEDNIKVWFN |
| 1621 | NKGWHALVSF LNVAHNAILR ASLPKDRSPE EYGITVISQP LNLTKEQLSE ITVLTTSVDA |
| 1681 | VVAICVIFSM SFVPASFVLY LIQERVNKSK HLQFISGVSP TTYWVTNFLW DIMNYSVSAG |
| 1741 | LVVGIFIGFQ KKAYTSPENL PALVALLLLY GWAVIPMMYP ASFLFDVPST AYVALSCANL |
| 1801 | FIGINSSAIT FILELFENNR TLLRFNAVLR KLLIVFPHFC LGRGLIDLAL SQAVTDVYAR |
| 1861 | FGEEHSANPF HWDLIGKNLF AMVVEGVVYF LLTLLVQRHF FLSQWIAEPT KEPIVDEDDD |
| 1921 | VAEERQRIIT GGNKTDILRL HELTKIYPGT SSPAVDRLCV GVRPGECFGL LGVNGAGKTT |
| 1981 | TFKMLTGDTT VTSGDATVAG KSILTNISEV HQNMGYCPQF DAIDELLTGR EHLYLYARLR |
| 2041 | GVPAEEIEKV ANWSIKSLGL TVYADCLAGT YSGGNKRKLS TAIALIGCPP LVLLDEPTTG |
| 2101 | MDPQARRMLW NVIVSIIREG RAVVLTSHSM EECEALCTRL AIMVKGAFRC MGTIQHLKSK |
| 2161 | FGDGYIVTMK IKSPKDDLLP DLNPVEQFFQ GNFPGSVQRE RHYNMLQFQV SSSSLARIFQ |
| 2221 | LLLSHKDSLL IEEYSVTQTT LDQVFVNFAK QQTESHDLPL HPRAAGASRQ AQD |

SEQ ID NO: 298
ATP BINDING CASSETTE SUBFAMILY A MEMBER 4 (ABCA4), ISOFORM CRA_A
EAW73056.1

| | |
|---|---|
| 1 | MGFVRQIQLL LWKNWTLRKR QKIRFVVELV WPLSLFLVLI WLRNANPLYS HHECHFPNKA |
| 61 | MPSAGMLPWL QGIFCNVNNP CFQSPTPGES PGIVSNYNNS ILARVYRDFQ ELLMNAPESQ |
| 121 | HLGRIWTELH ILSQFMDTLR THPERIAGRG IRIRDILKDE ETLTLFLIKN IGLSDSVVYL |
| 181 | LINSQVRPEQ FAHGVPDLAL KDIACSEALL ERFIIFSQRR GAKTVRYALC SLSQGTLQWI |
| 241 | EDTLYANVDF FKLFRVLPTL LDSRSQGINL RSWGGILSDM SPRIQEFIHR PSMQDLLWVT |
| 301 | RPLMQNGGPE TFTKLMGILS DLLCGYPEGG GSRVLSFNWY EDNNYKAFLG IDSTRKDPIY |
| 361 | SYDRRTTSFC NALIQSLESN PLTKIAWRAA KPLLMGKILY TPDSPAARRI LKNANSTFEE |
| 421 | LEHVRKLVKA WEEVGPQIWY FFDNSTQMNM IRDTLGNPTV KDFLNRQLGE EGITAEAILN |
| 481 | FLYKGPRESQ ADDMANFDWR DIFNITDRTL RLVNQYLECL VLDKFESYND ETQLTQRALS |
| 541 | LLEENMFWAG VVFPDMYPWT SSLPPHVKYK IRMDIDVVEK TNKIKDRYWD SGPRADPVED |
| 601 | FRYIWGGFAY LQDMVEQGIT RSQVQAEAPV GIYLQQMPYP CFVDDSFMII LNRCFPIFMV |
| 661 | LAWIYSVSMT VKSIVLEKEL RLKETLKNQG VSNAVIWCTW FLDSFSIMSM SIFLLTIFIM |
| 721 | HGRILHYSDP FILFLFLLAF STATIMLCFL LSTFFSKASL AAACSGVIYF TLYLPHILCF |
| 781 | AWQDRMTAEL KKAVSLLSPV AFGFGTEYLV RFEEQGLGLQ WSNIGNSPTE GDEFSFLLSM |
| 841 | QMMLLDAAVY GLLAWYLDQV FPGDYGTPLP WYFLLQESYW LGGEGCSTRE ERALEKTEPL |
| 901 | TEETEDPEHP EGIHDSFFER EHPGWVPGVC VKNLVKIFEP CGRPAVDRLN ITFYENQITA |
| 961 | FLGHNGAGKT TTLSILTGLL PPTSGTVLVG GRDIETSLDA VRQSLGMCPQ HNILFHHLTV |
| 1021 | AEHMLFYAQL KGKSQEEAQL EMEAMLEDTG LHHKRNEEAQ DLSGGMQRKL SVAIAFVGDA |
| 1081 | KVVILDEPTS GVDPYSRRSI WDLLLKYRSG RTIIMSTHHM DEADLLGDRI AIIAQGRLYC |
| 1141 | SGTPLFLKNC FGTGLYLTLV RKMKNIQSQR KGSEGTCSCS SKGFSTTCPA HVDDLTPEQV |
| 1201 | LDGDVNELMD VVLHHVPEAK LVECIGQELI FLLPNKNFKH RAYASLFREL EETLADLGLS |
| 1261 | SFGISDTPLE EIFLKVTEDS DSGPLFAGGA QQKRENVNPR HPCLGPREKA GQTPQDSNVC |
| 1321 | SPGAPAAHPE GQPPPEPECP GPQLNTGTQL VLQHVQALLV KRFQHTIRSH KDFLAQIVLP |
| 1381 | ATFVFLALML SIVIPPFGEY PALTLHPWIY GQQYTFFSMD EPGSEQFTVL ADVLLNKPGF |
| 1441 | GNRCLKEGWL PEYPCGNSTP WKTPSVSPNI TQLFQKQKWT QVNPSPSCRC STREKLTMLP |
| 1501 | ECPEGAGGLP PPQRTQRSTE ILQDLTDRNI SDFLVKTYPA LIRSSLKSKF WVNEQRYGGI |
| 1561 | SIGGKLPVVP ITGEALVGFL SDLGRIMNVS GGPITREASK EIPDFLKHLE TEDNIKVWFN |
| 1621 | NKGWHALVSF LNVAHNAILR ASLPKDRSPE EYGITVISQP LNLTKEQLSE ITVLTTSVDA |
| 1681 | VVAICVIFSM SFVPASFVLY LIQERVNKSK HLQFISGVSP TTYWVTNFLW DIMNYSVSAG |
| 1741 | LVVGIFIGFQ KKAYTSPENL PALVALLLLY GWAVIPMMYP ASFLFDVPST AYVALSCANL |
| 1801 | FIGINSSAIT FILELFENNR TLLRFNAVLR KLLIVFPHFC LGRGLIDLAL SQAVTDVYAR |
| 1861 | FGEEHSANPF HWDLIGKNLF AMVVEGVVYF LLTLLVQRHF FLSQWIAEPT KEPIVDEDDD |
| 1921 | VAEERQRIIT GGNKTDILRL HELTKIYPGT SSPAVDRLCV GVRPGECFGL LGVNGAGKTT |
| 1981 | TFKMLTGDTT VTSGDATVAG KSILTNISEV HQNMGYCPQF DAIDELLTGR EHLYLYARLR |
| 2041 | GVPAEEIEKV ANWSIKSLGL TVYADCLAGT YSGGNKRKLS TAIALIGCPP LVLLDEPTTG |
| 2101 | MDPQARRMLW NVIVSIIREG RAVVLTSHSM EECEALCTRL AIMVKGAFRC MGTIQHLKSK |
| 2161 | FGDGYIVTMK IKSPKDDLLP DLNPVEQFFQ GNFPGSVQRE RHYNMLQFQV SSSSLARIFQ |
| 2221 | LLLSHKDSLL IEEYSVTQTT LDQVFVNFAK QQTESHDLPL HPRAAGASRQ AQD |

SEQ ID NO: 299
ATP BINDING CASSETTE SUBFAMILY A MEMBER 4 (ABCA4), ISOFORM CRA_B
EAW73057.1

| | |
|---|---|
| 1 | MGFVRQIQLL LWKNWTLRKR QKIRFVVELV WPLSLFLVLI WLRNANPLYS HHECHFPNKA |
| 61 | MPSAGMLPWL QGIFCNVNNP CFQSPTPGES PGIVSNYNNS ILARVYRDFQ ELLMNAPESQ |
| 121 | HLGRIWTELH ILSQFMDTLR THPERIAGRG IRIRDILKDE ETLTLFLIKN IGLSDSVVYL |
| 181 | LINSQVRPEQ FAHGVPDLAL KDIACSEALL ERFIIFSQRR GAKTVRYALC SLSQGTLQWI |
| 241 | EDTLYANVDF FKLFRVLPTL LDSRSQGINL RSWGGILSDM SPRIQEFIHR PSMQDLLWVT |
| 301 | RPLMQNGGPE TFTKLMGILS DLLCGYPEGG GSRVLSFNWY EDNNYKAFLG IDSTRKDPIY |
| 361 | SYDRRTTSFC NALIQSLESN PLTKIAWRAA KPLLMGKILY TPDSPAARRI LKNANSTFEE |
| 421 | LEHVRKLVKA WEEVGPQIWY FFDNSTQMNM IRDTLGNPTV KDFLNRQLGE EGITAEAILN |
| 481 | FLYKGPRESQ ADDMANFDWR DIFNITDRTL RLVNQYLECL VLDKFESYND ETQLTQRALS |
| 541 | LLEENMFWAG VVFPDMYPWT SSLPPHVKYK IRMDIDVVEK TNKIKDRYWD SGPRADPVED |
| 601 | FRYIWGGFAY LQDMVEQGIT RSQVQAEAPV GIYLQQMPYP CFVDDSFMII LNRCFPIFMV |
| 661 | LAWIYSVSMT VKSIVLEKEL RLKETLKNQG VSNAVIWCTW FLDSFSIMSM SIFLLTIFIM |
| 721 | HGRILHYSDP FILFLFLLAF STATIMLCFL LSTFFSKASL AAACSGVIYF TLYLPHILCF |
| 781 | AWQDRMTAEL KKAVSLLSPV AFGFGTEYLV RFEEQGLGLQ WSNIGNSPTE GDEFSFLLSM |
| 841 | QMMLLDAAVY GLLAWYLDQV FPGDYGTPLP WYFLLQESYW LGGEGCSTRE ERALEKTEPL |
| 901 | TEETEDPEHP EGIHDSFFER EHPGWVPGVC VKNLVKIFEP CGRPAVDRLN ITFYENQITA |
| 961 | FLGHNGAGKT TTLSILTGLL PPTSGTVLVG GRDIETSLDA VRQSLGMCPQ HNILFHHLTV |
| 1021 | AEHMLFYAQL KGKSQEEAQL EMEAMLEDTG LHHKRNEEAQ DLSGGMQRKL SVAIAFVGDA |
| 1081 | KVVILDEPTS GVDPYSRRSI WDLLLKYRSG RTIIMSTHHM DEADLLGDRI AIIAQGRLYC |
| 1141 | SGTPLFLKNC FGTGLYLTLV RKMKNIQSQR KGSEVVIPSI CCRGPAAARL RVSPPRVQPT |
| 1201 | SMT |

SEQ ID NO: 300
ATP BINDING CASSETTE SUBFAMILY A MEMBER 4 (ABCA4), ISOFORM CRA_C
EAW73058.1

| | |
|---|---|
| 1 | MGFVRQIQLL LWKNWTLRKR QKIRFVVELV WPLSLFLVLI WLRNANPLYS HHECHFPNKA |
| 61 | MPSAGMLPWL QGIFCNVNNP CFQSPTPGES PGIVSNYNNS ILARVYRDFQ ELLMNAPESQ |
| 121 | HLGRIWTELH ILSQFMDTLR THPERIAGRG IRIRDILKDE ETLTLFLIKN IGLSDSVVYL |
| 181 | LINSQVRPEQ FAHGVPDLAL KDIACSEALL ERFIIFSQRR GAKTVRYALC SLSQGTLQWI |
| 241 | EDTLYANVDF FKLFRVLPTL LDSRSQGINL RSWGGILSDM SPRIQEFIHR PSMQDLLWVT |
| 301 | RPLMQNGGPE TFTKLMGILS DLLCGYPEGG GSRVLSFNWY EDNNYKAFLG IDSTRKDPIY |
| 361 | SYDRRTTSFC NALIQSLESN PLTKIAWRAA KPLLMGKILY TPDSPAARRI LKNANSTFEE |
| 421 | LEHVRKLVKA WEEVGPQIWY FFDNSTQMNM IRDTLGNPTV KDFLNRQLGE EGITAEAILN |
| 481 | FLYKGPRESQ ADDMANFDWR DIFNITDRTL RLVNQYLECL VLDKFESYND ETQLTQRALS |
| 541 | LLEENMFWAG VVFPDMYPWT SSLPPHVKYK IRMDIDVVEK TNKIKDRYWD SGPRADPVED |
| 601 | FRYIWGGFAY LQDMVEQGIT RSQVQAEAPV GIYLQQMPYP CFVDDSFMII LNRCFPIFMV |
| 661 | LAWIYSVSMT VKSIVLEKEL RLKETLKNQG VSNAVIWCTW FLDSFSIMSM SIFLLTIFIM |
| 721 | HGRILHYSDP FILFLFLLAF STATIMLCFL LSTFFSKASL AAACSGVIYF TLYLPHILCF |
| 781 | AWQDRMTAEL KKAVSLLSPV AFGFGTEYLV RFEEQGLGLQ WSNIGNSPTE GDEFSFLLSM |
| 841 | QMMLLDAAVY GLLAWYLDQV FPGDYGTPLP WYFLLQESYW LGGEGCSTRE ERALEKTEPL |
| 901 | TEETEDPEHP EGIHDSFFER EHPGWVPGVC VKNLVKIFEP CGRPAVDRLN ITFYENQITA |
| 961 | FLGHNGAGKT TTLSILTGLL PPTSGTVLVG GRDIETSLDA VRQSLGMCPQ HNILFHHLTV |
| 1021 | AEHMLFYAQL KGKSQEEAQL EMEAMLEDTG LHHKRNEEAQ DLSGGMQRKL SVAIAFVGDA |
| 1081 | KVVILDEPTS GVDPYSRRSI WDLLLKYRSG RTIIMSTHHM DEADLLGDRI AIIAQGRLYC |
| 1141 | SGTPLFLKNC FGTGLYLTLV RKMKNIQSQR KGSEGTCSCS SKGFSTTCPA HVDDLTPEQV |
| 1201 | LDGDVNELMD VVLHHVPEAK LVECIGQELI FLLPNKNFKH RAYASLFREL EETLADLGLS |
| 1261 | SFGISDTPLE EIFLKVTEDS DSGPLFAGGA QQKRENVNPR HPCLGPREKA GQTPQDSNVC |
| 1321 | SPGAPAAHPE GQPPPEPECP GPQLNTGTQL VLQHVQALLV KRFQHTIRSH KDFLAQIVLP |
| 1381 | ATFVFLALML SIVIPPFGEY PALTLHPWIY GQQYTFFSMD EPGSEQFTVL ADVLLNKPGF |
| 1441 | GNRCLKEGWL PEYPCGNSTP WKTPSVSPNI TQLFQKQKWT QVNPSPSCRC STREKLTMLP |
| 1501 | ECPEGAGGLP PPQRTQRSTE ILQDLTDRNI SDFLVKTYPA LIRSSLKSKF WVNEQRYGGI |
| 1561 | SIGGKLPVVP ITGEALVGFL SDLGRIMNVS GGPITREASK EIPDFLKHLE TEDNIKVWFN |
| 1621 | NKGWHALVSF LNVAHNAILR ASLPKDRSPE EYGITVISQP LNLTKEQLSE ITVLTTSVDA |
| 1681 | VVAICVIFSM SFVPASFVLY LIQERVNKSK HLQFISGVSP TTYWVTNFLW DIMNYSVSAG |
| 1741 | LVVGIFIGFQ KKAYTSPENL PALVALLLLY GWAVIPMMYP ASFLFDVPST AYVALSCANL |
| 1801 | FIGINSSAIT FILELFENNR TLLRFNAVLR KLLIVFPHFC LGRGLIDLAL SQAVTDVYAR |
| 1861 | FGEEHSANPF HWDLIGKNLF AMVVEGVVYF LLTLLVQRHF FLSQWIAEPT KEPIVDEDDD |
| 1921 | VAEERQRIIT GGNKTDILRL HELTKIYPGT SSPAVDRLCV GVRPGECFGL LGVNGAGKTT |
| 1981 | TFKMLTGDTT VTSGDATVAG KSILTNISEV HQNMGYCPQF DAIDELLTGR EHLYLYARLR |
| 2041 | GVPAEEIEKV ANWSIKSLGL TVYADCLAGT YSGGNKRKLS TAIALIGCPP LVLLDEPTTG |
| 2101 | MDPQARRMLW NVIVSIIREG RAVVLTSHRQ EIPRAGEECE ALCTRLAIMV KGAFRCMGTI |
| 2161 | QHLKSKFGDG YIVTMKIKSP KDDLLPDLNP VEQFFQGNFP GSVQRERHYN MLQFQVSSSS |
| 2221 | LARIFQLLLS HKDSLLIEEY SVTQTTLDQA SVCKFC |

SEQ ID NO: 301
ELOVL FATTY ACID ELONGASE 4 (ELOVL4)
NP_073563.1

| | |
|---|---|
| 1 | MGLLDSEPGS VLNVVSTALN DTVEFYRWTW SIADKRVENW PLMQSPWPTL SISTLYLLFV |
| 61 | WLGPKWMKDR EPFQMRLVLI IYNFGMVLLN LFIFRELFMG SYNAGYSYIC QSVDYSNNVH |
| 121 | EVRIAAALWW YFVSKGVEYL DTVFFILRKK NNQVSFLHVY HHCTMFTLWW IGIKWVAGGQ |
| 181 | AFFGAQLNSF IHVIMYSYYG LTAFGPWIQK YLWWKRYLTM LQLIQFHVTI GHTALSLYTD |
| 241 | CPFPKWMHWA LIAYAISFIF LFLNFYIRTY KEPKKPKAGK TAMNGISANG VSKSEKQLMI |
| 301 | ENGKKQKNGK AKGD |

SEQ ID NO: 302
INTERLEUKIN 6 (IL6)
AAC41704.1

| | |
|---|---|
| 1 | MNSFSTSAFG PVAFSLGLLL VLPAAFPAPV PPGEDSKDVA APHRQPLTSS ERIDKQIRYI |
| 61 | LDGISALRKE TCNKSNMCES SKEALAENNL NLPKMAEKDG CFQSGFNEET CLVKIITGLL |
| 121 | EFEVYLEYLQ NRFESSEEQA RAVQMSTKVL IQFLQKKAKN LDAITTPDPT TNASLLTKLQ |
| 181 | AQNQWLQDMT THLILRSFKE FLQSSLRALR QM |

SEQ ID NO: 303
TNF-ALPHA (TNF)
CAA26669.1

| | |
|---|---|
| 1 | MSTESMIRDV ELAEEALPKK TGGPQGSRRC LFLSLFSFLI VAGATTLFCL LHFGVIGPQR |
| 61 | EEFPRDLSLI SPLAQAVRSS SRTPSDKPVA HVVANPQAEG QLQWLNRRAN ALLANGVELR |
| 121 | DNQLVVPSEG LYLIYSQVLF KGQGCPSTHV LLTHTISRIA VSYQTKVNLL SAIKSPCQRE |
| 181 | TPEGAEAKPW YEPIYLGGVF QLEKGDRLSA EINRPDYLDF AESGQVYFGI IAL |

SEQ ID NO: 304
L OPSIN (OPN1LW)
NP_064445.2

| | |
|---|---|
| 1 | MAQQWSLQRL AGRHPQDSYE DSTQSSIFTY TNSNSTRGPF EGPNYHIAPR WVYHLTSVWM |
| 61 | IFVVTASVFT NGLVLAATMK FKKLRHPLNW ILVNLAVADL AETVIASTIS IVNQVSGYFV |
| 121 | LGHPMCVLEG YTVSLCGITG LWSLAIISWE RWMVVCKPFG NVRFDAKLAI VGIAFSWIWA |
| 181 | AVWTAPPIFG WSRYWPHGLK TSCGPDVFSG SSYPGVQSYM IVLMVTCCII PLAIIMLCYL |
| 241 | QVWLAIRAVA KQQKESESTQ KAEKEVTRMV VVMIFAYCVC WGPYTFFACF AAANPGYAFH |
| 301 | PLMAALPAYF AKSATIYNPV IYVFMNRQFR NCILQLFGKK VDDGSELSSA SKTEVSSVSS |
| 361 | VSPA |

SEQ ID NO: 305
M OPSIN (OPN1MW)
NP_000504.1

| | |
|---|---|
| 1 | MAQQWSLQRL AGRHPQDSYE DSTQSSIFTY TNSNSTRGPF EGPNYHIAPR WVYHLTSVWM |
| 61 | IFVVIASVFT NGLVLAATMK FKKLRHPLNW ILVNLAVADL AETVIASTIS VVNQVYGYFV |
| 121 | LGHPMCVLEG YTVSLCGITG LWSLAIISWE RWMVVCKPFG NVRFDAKLAI VGIAFSWIWA |
| 181 | AVWTAPPIFG WSRYWPHGLK TSCGPDVFSG SSYPGVQSYM IVLMVTCCIT PLSIIVLCYL |
| 241 | QVWLAIRAVA KQQKESESTQ KAEKEVTRMV VVMVLAFCFC WGPYAFFACF AAANPGYPFH |
| 301 | PLMAALPAFF AKSATIYNPV IYVFMNRQFR NCILQLFGKK VDDGSELSSA SKTEVSSVSS |
| 361 | VSPA |

SEQ ID NO: 306
GUANYLATE CYCLASE 2D, RETINAL (GUCY2D)
Q02846.2

| | |
|---|---|
| 1 | MTACARRAGG LPDPGLCGPA WWAPSLPRLP RALPRLPLLL LLLLLQPPAL SAVFTVGVLG |
| 61 | PWACDPIFSR ARPDLAARLA AARLNRDPGL AGGPRFEVAL LPEPCRTPGS LGAVSSALAR |
| 121 | VSGLVGPVNP AACRPAELLA EEAGIALVPW GCPWTQAEGT TAPAVTPAAD ALYALLRAFG |
| 181 | WARVALVTAP QDLWVEAGRS LSTALRARGL PVASVTSMEP LDLSGAREAL RKVRDGPRVT |
| 241 | AVIMVMHSVL LGGEEQRYLL EAAEELGLTD GSLVFLPFDT IHYALSPGPE ALAALANSSQ |
| 301 | LRRAHDAVLT LTRHCPSEGS VLDSLRRAQE RRELPSDLNL QQVSPLFGTI YDAVFLLARG |
| 361 | VAEARAAAGG RWVSGAAVAR HIRDAQVPGF CGDLGGDEEP PFVLLDTDAA GDRLFATYML |
| 421 | DPARGSFLSA GTRMHFPRGG SAPGPDPSCW FDPNNICGGG LEPGLVFLGF LLVVGMGLAG |
| 481 | AFLAHYVRHR LLHMQMVSGP NKIILTVDDI TFLHPHGGTS RKVAQGSRSS LGARSMSDIR |
| 541 | SGPSQHLDSP NIGVYEGDRV WLKKFPGDQH IAIRPATKTA FSKLQELRHE NVALYLGLFL |
| 601 | ARGAEGPAAL WEGNLAVVSE HCTRGSLQDL LAQREIKLDW MFKSSLLLDL IKGIRYLHHR |
| 661 | GVAHGRLKSR NCIVDGRFVL KITDHGHGRL LEAQKVLPEP PRAEDQLWTA PELLRDPALE |
| 721 | RRGTLAGDVF SLAIIMQEVV CRSAPYAMLE LTPEEVVQRV RSPPPLCRPL VSMDQAPVEC |
| 781 | ILLMKQCWAE QPELRPSMDH TFDLFKNINK GRKTNIIDSM LRMLEQYSSN LEDLIRERTE |
| 841 | ELELEKQKTD RLLTQMLPPS VAEALKTGTP VEPEYFEQVT LYFSDIVGFT TISAMSEPIE |
| 901 | VVDLLNDLYT LFDAIIGSHD VYKVETIGDA YMVASGLPQR NGQRHAAEIA NMSLDILSAV |
| 961 | GTFRMRHMPE VPVRIRIGLH SGPCVAGVVG LTMPRYCLFG DTVNTASRME STGLPYRIHV |
| 1021 | NLSTVGILRA LDSGYQVELR GRTELKGKGA EDTFWLVGRR GFNKPIPKPP DLQPGSSNHG |
| 1081 | ISLQEIPPER RRKLEKARPG QFS |

SEQ ID NO: 307
RETINOID ISOMEROHYDROLASE RPE65 (RPE65)
NP_000320.1

| | |
|---|---|
| 1 | MSIQVEHPAG GYKKLFETVE ELSSPLTAHV TGRIPLWLTG SLLRCGPGLF EVGSEPFYHL |
| 61 | FDGQALLHKF DFKEGHVTYH RRFIRTDAYV RAMTEKRIVI TEFGTCAFPD PCKNIFSRFF |
| 121 | SYFRGVEVTD NALVNVYPVG EDYYACTETN FITKINPETL ETIKQVDLCN YVSVNGATAH |
| 181 | PHIENDGTVY NIGNCFGKNF SIAYNIVKIP PLQADKEDPI SKSEIVVQFP CSDRFKPSYV |
| 241 | HSFGLTPNYI VFVETPVKIN LFKFLSSWSL WGANYMDCFE SNETMGVWLH IADKKRKKYL |
| 301 | NNKYRTSPFN LFHHINTYED NGFLIVDLCC WKGFEFVYNY LYLANLRENW EEVKKNARKA |
| 361 | PQPEVRRYVL PLNIDKADTG KNLVTLPNTT ATAILCSDET IWLEPEVLFS GPRQAFEFPQ |
| 421 | INYQKYCGKP YTYAYGLGLN HFVPDRLCKL NVKTKETWVW QEPDSYPSEP IFVSHPDALE |
| 481 | EDDGVVLSVV VSPGAGQKPA YLLILNAKDL SEVARAEVEI NIPVTFHGLF KKS |

SEQ ID NO: 308
RETINOID ISOMEROHYDROLASE RPE65 (RPE65), ISOFORM X1
XP_016857516.1

| | |
|---|---|
| 1 | MTEKRIVITE FGTCAFPDPC KNIFSRFFSY FRGVEVTDNA LVNVYPVGED YYACTETNFI |
| 61 | TKINPETLET IKQVDLCNYV SVNGATAHPH IENDGTVYNI GNCFGKNFSI AYNIVKIPPL |
| 121 | QADKEDPISK SEIVVQFPCS DRFKPSYVHS FGLTPNYIVF VETPVKINLF KFLSSWSLWG |
| 181 | ANYMDCFESN ETMGVWLHIA DKKRKKYLNN KYRTSPFNLF HHINTYEDNG FLIVDLCCWK |
| 241 | GFEFVYNYLY LANLRENWEE VKKNARKAPQ PEVRRYVLPL NIDKADTGKN LVTLPNTTAT |
| 301 | AILCSDETIW LEPEVLFSGP RQAFEFPQIN YQKYCGKPYT YAYGLGLNHF VPDRLCKLNV |
| 361 | KTKETWVWQE PDSYPSEPIF VSHPDALEED DGVVLSVVVS PGAGQKPAYL LILNAKDLSE |
| 421 | VARAEVEINI PVTFHGLFKK S |

SEQ ID NO: 309
ARYL HYDROCARBON RECEPTOR INTERACTING PROTEIN LIKE 1 (AIPL1)
CAH25996.1

| | |
|---|---|
| 1 | MDAALLLNVE GVKKTILHGG TGELPNFITG SRVIFHFRTM KCDEERTVID DSRQVGQPMH |
| 61 | IIIGNMFKLE VWEILLTSMR VHEVAEFWCD TIHTGVYPIL SRSLRQMAQG KDPTEWHVHT |
| 121 | CGLANMFAYH TLGYEDLDEL QKEPQPLVFV IELLQVDAPS DYQRETWNLS NHEKMKAVPV |
| 181 | LHGEGNRLFK LGRYEEASSK YQEAIICLRN LQTKCLLKKE EYYEVLEHTS DILRHHPGIV |
| 241 | KAYYVRARAH AEVWNEAEAK ADLQKVLELE PSMQKAVRRE LRLLENRMAE KQEEERLRCR |
| 301 | NMLSQGATQP PAEPPTEPPA QSSTEPPAEP PTAPSAELSA GPPAEPATEP PPSPGHSLQH |

SEQ ID NO: 310
ARYL HYDROCARBON RECEPTOR INTERACTING PROTEIN LIKE 1 (AIPL1)
CAH25995.1

| | |
|---|---|
| 1 | MDAALLLNVE GVKKTILHGG TGELPNFITG SRVGQPMHII IGNMFKLEVW EILLTSMRVH |
| 61 | EVAEFWCDTI HTGVYPILSR SLRQMAQGKD PTEWHVHTCG LANMFAYHTL GYEDLDELQK |
| 121 | EPQPLVFVIE LLQVDAPSDY QRETWNLSNH EKMKAVPVLH GEGNRLFKLG RYEEASSKYQ |
| 181 | EAIICLRNLQ TKEKPWEVQW LKLEKMINTL ILNYCQCLLK KEEYYEVLEH TSDILRHHPG |
| 241 | IVKAYYVRAR AHAEVWNEAE AKADLQKVLE LEPSMQKAVR RELRLLENRM AEKQEEERLR |
| 301 | CRNMLSQGAT QPPAEPPTEP PAQSSTEPPA EPPTAPSAEL SAGPPAEPAT EPPPSPGHSL |
| 361 | QH |

SEQ ID NO: 311
ARYL HYDROCARBON RECEPTOR INTERACTING PROTEIN LIKE 1 (AIPL1)
CAG17883.1

| | |
|---|---|
| 1 | MDAALLLNVE GVKKTILHGG TGELPNFITG SRVIFHFRTM KCDEERTVID DSRQVGQPMH |
| 61 | IIIGNMFKLE VWEILLTSMR VHEVAEFWCH TIVDAPSDYQ RETWNLSNHE KMKAVPVLHG |
| 121 | EGNRLFKLGR YEEASSKYQE AIICLRNLQT KEKPWEVQWL KLEKMINTLI LNYCQCLLKK |
| 181 | EEYYEVLEHT SDILRHHPGI VKAYYVRARA HAEVWNEAEA KADLQKVLEL EPSMQKAVRR |
| 241 | ELRLLENRMA EKQEEERLRC RNMLSQGATQ PPAEPPTEPP AQSSTEPPAE PPTAPSAELS |
| 301 | AGPPAEPATE PPPSPGHSLQ H |

SEQ ID NO: 312
ARYL HYDROCARBON RECEPTOR INTERACTING PROTEIN LIKE 1 (AIPL1)
CAG17882.1

| | |
|---|---|
| 1 | MDAALLLNVE GVKKTILHGG TGELPNFITG SRHTGVYPIL SRSLRQMAQG KDPTEWHVHT |
| 61 | CGLANMFAYH TLGYEDLDEL QKEPQPLVFV IELLQVDAPS DYQRETWNLS NHEKMKAVPV |
| 121 | LHGEGNRLFK LGRYEEASSK YQEAIICLRN LQTKEKPWEV QWLKLEKMIN TLILNYCQCL |
| 181 | LKKKEYYEVL EHTSDILRHH PGIVKAYYVR ARAHAEVWNE AEAKADLQKV LELEPSMQKA |
| 241 | VRRELRLLEN RMAEKQEEER LRCRNMLSQG ATQPPAEPPT EPPAQSSTEP PAEPPTAPSA |
| 301 | ELSAGPPAEP ATEPPPSPGH SLQH |

SEQ ID NO: 313
ARYL HYDROCARBON RECEPTOR INTERACTING PROTEIN LIKE 1 (AIPL1)
AAH12055.1

| | |
|---|---|
| 1 | MDAALLLNVE GVKKTILHGG TGELPNFITG SRVIFHFRTM KCDEERTVID DSRQVGQPMH |
| 61 | IIIGNMFKLE VWEILLTSMR VHEVAEFWCD TIHTGVYPIL SRSLRQMAQG KDPTEWHVHT |
| 121 | CGLANMFAYH TLGYEDLDEL QKEPQPLVFV IELLQVDAPS DYQRETWNLS NHEKMKAVPV |
| 181 | LHGEGNRLFK LGRYEEASSK YQEAIICLRN LQTKEKPWEV QWLKLEKMIN TLILNYCQCL |
| 241 | LKKEEYYEVL EHTSDILRHH PGIVKAYYVR ARAHAEVWNE AEAKADLQKV LELEPSMQKA |
| 301 | VRRELRLLEN RMAEKQEEER LRCRNMLSQG ATQPPAEPPT EPPAQSSTEP PAEPPTAPSA |
| 361 | ELSAGPPAEP ATEPPPSPGH SLQH |

SEQ ID NO: 314
C5B isoform 1
NP_001726.2

| | |
|---|---|
| 1 | MGLLGILCFL IFLGKTWGQE QTYVISAPKI FRVGASENIV IQVYGYTEAF DATISIKSYP |
| 61 | DKKFSYSSGH VHLSSENKFQ NSAILTIQPK QLPGGQNPVS YVYLEVVSKH FSKSKRMPIT |
| 121 | YDNGFLFIHT DKPVYTPDQS VKVRVYSLND DLKPAKRETV LTFIDPEGSE VDMVEEIDHI |
| 181 | GIISFPDFKI PSNPRYGMWT IKAKYKEDFS TTGTAYFEVK EYVLPHFSVS IEPEYNFIGY |
| 241 | KNFKNFEITI KARYFYNKVV TEADVYITFG IREDLKDDQK EMMQTAMQNT MLINGIAQVT |
| 301 | FDSETAVKEL SYYSLEDLNN KYLYIAVTVI ESTGGFSEEA EIPGIKYVLS PYKLNLVATP |
| 361 | LFLKPGIPYP IKVQVKDSLD QLVGGVPVTL NAQTIDVNQE TSDLDPSKSV TRVDDGVASF |
| 421 | VLNLPSGVTV LEFNVKTDAP DLPEENQARE GYRAIAYSSL SQSYLYIDWT DNHKALLVGE |
| 481 | HLNIIVTPKS PYIDKITHYN YLILSKGKII HFGTREKFSD ASYQSINIPV TQNMVPSSRL |
| 541 | LVYYIVTGEQ TAELVSDSVW LNIEEKCGNQ LQVHLSPDAD AYSPGQTVSL NMATGMDSWV |
| 601 | ALAAVDSAVY GVQRGAKKPL ERVFQFLEKS DLGCGAGGGL NNANVFHLAG LTFLTNANAD |
| 661 | DSQENDEPCK EILRPRRTLQ KKIEEIAAKY KHSVVKKCCY DGACVNNDET CEQRAARISL |
| 721 | GPRCIKAFTE CCVVASQLRA NISHKDMQLG RLHMKTLLPV SKPEIRSYFP ESWLWEVHLV |
| 781 | PRRKQLQFAL PDSLTTWEIQ GVGISNTGIC VADTVKAKVF KDVFLEMNIP YSVVRGEQIQ |
| 841 | LKGTVYNYRT SGMQFCVKMS AVEGICTSES PVIDHQGTKS SKCVRQKVEG SSSHLVTFTV |
| 901 | LPLEIGLHNI NFSLETWFGK EILVKTLRVV PEGVKRESYS GVTLDPRGIY GTISRRKEFP |
| 961 | YRIPLDLVPK TEIKRILSVK GLLVGEILSA VLSQEGINIL THLPKGSAEA ELMSVVPVFY |
| 1021 | VFHYLETGNH WNIFHSDPLI EKQKLKKKLK EGMLSIMSYR NADYSYSVWK GGSASTWLTA |
| 1081 | FALRVLGQVN KYVEQNQNSI CNSLLWLVEN YQLDNGSFKE NSQYQPIKLQ GTLPVEAREN |
| 1141 | SLYLTAFTVI GIRKAFDICP LVKIDTALIK ADNFLLENTL PAQSTFTLAI SAYALSLGDK |
| 1201 | THPQFRSIVS ALKREALVKG NPPIYRFWKD NLQHKDSSVP NTGTARMVET TAYALLTSLN |
| 1261 | LKDINYVNPV IKWLSEEQRY GGGFYSTQDT INAIEGLTEY SLLVKQLRLS MDIDVSYKHK |
| 1321 | GALHNYKMTD KNFLGRPVEV LLNDDLIVST GFGSGLATVH VTTVVHKTST SEEVCSFYLK |
| 1381 | IDTQDIEASH YRGYGNSDYK RIVACASYKP SREESSSGSS HAVMDISLPT GISANEEDLK |
| 1441 | ALVEGVDQLF TDYQIKDGHV ILQLNSIPSS DFLCVRFRIF ELFEVGFLSP ATFTVYEYHR |
| 1501 | PDKQCTMFYS TSNIKIQKVC EGAACKCVEA DCGQMQEELD LTISAETRKQ TACKPEIAYA |
| 1561 | YKVSITSITV ENVFVKYKAT LLDIYKTGEA VAEKDSEITF IKKVICTNAE LVKGRQYLIM |
| 1621 | GKEALQIKYN FSFRYIYPLD SLTWIEYWPR DTTCSSCQAF LANLDEFAED IFLNGC |

SEQ ID NO: 315
CSB, isoform 2
NP_001304092.1

| | |
|---|---|
| 1 | MPGSLGREAS GRAGPTGCGA FAFGLRCRYV ISAPKIFRVG ASENIVIQVY GYTEAFDATI |
| 61 | SIKSYPDKKF SYSSGHVHLS SENKFQNSAI LTIQPKQLPG GQNPVSYVYL EVVSKHFSKS |
| 121 | KRMPITYDNG FLFIHTDKPV YTPDQSVKVR VYSLNDDLKP AKRETVLTFI DPEGSEVDMV |
| 181 | EEIDHIGIIS FPDFKIPSNP RYGMWTIKAK YKEDFSTTGT AYFEVKEYVL PHFSVSIEPE |
| 241 | YNFIGYKNFK NFEITIKARY FYNKVVTEAD VYITFGIRED LKDDQKEMMQ TAMQNTMLIN |
| 301 | GIAQVTFDSE TAVKELSYYS LEDLNNKYLY IAVIVIESTG GFSEEAEIPG IKYVLSPYKL |
| 361 | NLVATPLFLK PGIPYPIKVQ VKDSLDQLVG GVPVTLNAQT IDVNQETSDL DPSKSVTRVD |
| 421 | DGVASFVLNL PSGVTVLEFN VKTDAPDLPE ENQAREGYRA IAYSSLSQSY LYIDWTDNHK |
| 481 | ALLVGEHLNI IVTPKSPYID KITHYNYLIL SKGKIIHFGT REKFSDASYQ SINIPVTQNM |
| 541 | VPSSRLLVYY IVTGEQTAEL VSDSVWLNIE EKCGNQLQVH LSPDADAYSP GQTVSLNMAT |
| 601 | GMDSWVALAA VDSAVYGVQR GAKKPLERVF QFLEKSDLGC GAGGGLNNAN VFHLAGLTFL |
| 661 | TNANADDSQE NDEPCKEILR PRRTLQKKIE EIAAKYKHSV VKKCCYDGAC VNNDETCEQR |
| 721 | AARISLGPRC IKAFTECCVV ASQLRANISH KDMQLGRLHM KTLLPVSKPE IRSYFPESWL |
| 781 | WEVHLVPRRK QLQFALPDSL TTWEIQGVGI SNTGICVADT VKAKVFKDVF LEMNIPYSVV |
| 841 | RGEQIQLKGT VYNYRTSGMQ FCVKMSAVEG ICTSESPVID HQGTKSSKCV RQKVEGSSSH |
| 901 | LVTFTVLPLE IGLHNINFSL ETWFGKEILV KTLRVVPEGV KRESYSGVTL DPRGIYGTIS |
| 961 | RRKEFPYRIP LDLVPKTEIK RILSVKGLLV GEILSAVLSQ EGINILTHLP KGSAEAELMS |
| 1021 | VVPVFYVFHY LETGNHWNIF HSDPLIEKQK LKKKLKEGML SIMSYRNADY SYSVWKGGSA |
| 1081 | STWLTAFALR VLGQVNKYVE QNQNSICNSL LWLVENYQLD NGSFKENSQY QPIKLQGTLP |
| 1141 | VEARENSLYL TAFTVIGIRK AFDICPLVKI DTALIKADNF LLENTLPAQS TFTLAISAYA |
| 1201 | LSLGDKTHPQ FRSIVSALKR EALVKGNPPI YRFWKDNLQH KDSSVPNTGT ARMVETTAYA |
| 1261 | LLTSLNLKDI NYVNPVIKWL SEEQRYGGGF YSTQDTINAI EGLTEYSLLV KQLRLSMDID |
| 1321 | VSYKHKGALH NYKMTDKNFL GRPVEVLLND DLIVSTGFGS GLATVHVTTV VHKTSTSEEV |
| 1381 | CSFYLKIDTQ DIEASHYRGY GNSDYKRIVA CASYKPSREE SSSGSSHAVM DISLPTGISA |
| 1441 | NEEDLKALVE GVDQLFTDYQ IKDGHVILQL NSIPSSDFLC VRFRIFELFE VGFLSPATFT |
| 1501 | VYEYHRPDKQ CTMFYSTSNI KIQKVCEGAA CKCVEADCGQ MQEELDLTIS AETRKQTACK |
| 1561 | PEIAYAYKVS ITSITVENVF VKYKATLLDI YKTGEAVAEK DSEITFIKKV TCTNAELVKG |
| 1621 | RQYLIMGKEA LQIKYNFSFR YIYPLDSLTW IEYWPRDTTC SSCQAFLANL DEFAEDIFLN |
| 1681 | GC |

SEQ ID NO: 316
C5B, isoform 3
NP_001304093.1

| | |
|---|---|
| 1 | MGLLGILCFL IFLGKTWGQE QTYVISAPKI FRVGASENIV IQVYGYTEAF DATISIKSYP |
| 61 | DKKFSYSSGH VHLSSENKFQ NSAILTIQPK QLPGGQNPVS YVYLEVVSKH FSKSKRMPIT |
| 121 | YDNGFLFIHT DKPVYTPDQS VKVRVYSLND DLKPAKRETV LTFIDPEGSE VDMVEEIDHI |
| 181 | GIISFPDFKI PSNPRYGMWT IKAKYKEDFS TTGTAYFEVK EYVLPHFSVS IEPEYNFIGY |
| 241 | KNFKNFEITI KARYFYNKVV TEADVYITFG IREDLKDDQK EMMQTAMQNT MLINGIAQVT |
| 301 | FDSETAVKEL SYYSLEDLNN KYLYIAVTVI ESTGGFSEEA EIPGIKYVLS PYKLNLVATP |
| 361 | LFLKPGIPYP IKVQVKDSLD QLVGGVPVTL NAQTIDVNQE TSDLDPSKSV TRVDDGVASF |
| 421 | VLNLPSGVTV LEFNVKTDAP DLPEENQARE GYRAIAYSSL SQSYLYIDWT DNHKALLVGE |
| 481 | HLNIIVTPKS PYIDKITHYN YLILSKGKII HFGTREKFSD ASYQSINIPV TQNMVPSSRL |
| 541 | LVYYIVTGEQ TAELVSDSVW LNIEEKCGNQ LQVHLSPDAD AYSPGQTVSL NMATGMDSWV |
| 601 | ALAAVDSAVY GVQRGAKKPL ERVFQFLEKS DLGCGAGGGL NNANVFHLAG LTFLTNANAD |
| 661 | DSQENDEPCK EILRPRRTLQ KKIEEIAAKY KHSVVKKCCY DGACVNNDET CEQRAARISL |
| 721 | GPRCIKAFTE CCVVASQLRA NISHKDMQLG RLHMKTLLPV SKPEIRSYFP ESWLWEVHLV |
| 781 | PRRKQLQFAL PDSLTTWEIQ GVGISNTGIC VADTVKAKVF KDVFLEMNIP YSVVRGEQIQ |
| 841 | LKGTVYNYRT SGMQSLALSP RLECNGKISG HCKLRLPGSS DSPASASQVA GITGTHHHAQ |
| 901 | PT |

SEQ ID NO: 317
C6
NP_001108603.2

| | |
|---|---|
| 1 | MARRSVLYFI LLNALINKGQ ACFCDHYAWT QWTSCSKTCN SGTQSRHRQI VVDKYYQENF |
| 61 | CEQICSKQET RECNWQRCPI NCLLGDFGPW SDCDPCIEKQ SKVRSVLRPS QFGGQPCTAP |
| 121 | LVAFQPCIPS KLCKIEEADC KNKFRCDSGR CIARKLECNG ENDCGDNSDE RDCGRTKAVC |
| 181 | TRKYNPIPSV QLMGNGFHFL AGEPRGEVLD NSFTGGICKT VKSSRTSNPY RVPANLENVG |
| 241 | FEVQTAEDDL KTDFYKDLTS LGHNENQQGS FSSQGGSSFS VPIFYSSKRS ENINHNSAFK |
| 301 | QAIQASHKKD SSFIRIHKVM KVLNFTTKAK DLHLSDVFLK ALNHLPLEYN SALYSRIFDD |
| 361 | FGTHYFTSGS LGGVYDLLYQ FSSEELKNSG LTEEEAKHCV RIETKKRVLF AKKTKVEHRC |
| 421 | TTNKLSEKHE GSFIQGAEKS ISLIRGGRSE YGAALAWEKG SSGLEEKTFS EWLESVKENP |
| 481 | AVIDFELAPI VDLVRNIPCA VTKRNNLRKA LQEYAAKFDP CQCAPCPNNG RPTLSGTECL |
| 541 | CVCQSGTYGE NCEKQSPDYK SNAVDGQWGC WSSWSTCDAT YKRSRTRECN NPAPQRGGKR |
| 601 | CEGEKRQEED CTFSIMENNG QPCINDDEEM KEVDLPEIEA DSGCPQPVPP ENGFIRNEKQ |
| 661 | LYLVGEDVEI SCLTGFETVG YQYFRCLPDG TWRQGDVECQ RTECIKPVVQ EVLTITPFQR |
| 721 | LYRIGESIEL TCPKGFVVAG PSRYTCQGNS WTPPISNSLT CEKDTLTKLK GHCQLGQKQS |
| 781 | GSECICMSPE EDCSHHSEDL CVFDTDSNDY FTSPACKFLA EKCLNNQQLH FLHIGSCQDG |
| 841 | RQLEWGLERT RLSSNSTKKE SCGYDTCYDW EKCSASTSKC VCLLPPQCFK GGNQLYCVKM |
| 901 | GSSTSEKTLN ICEVGTIRCA NRKMEILHPG KCLA |

SEQ ID NO: 318
C7
NP_000578.2

| | |
|---|---|
| 1 | MKVISLFILV GFIGEFQSFS SASSPVNCQW DFYAPWSECN GCTKTQTRRR SVAVYGQYGG |
| 61 | QPCVGNAFET QSCEPTRGCP TEEGCGERFR CFSGQCISKS LVCNGDSDCD EDSADEDRCE |
| 121 | DSERRPSCDI DKPPPNIELT GNGYNELTGQ FRNRVINTKS FGGQCRKVFS GDGKDFYRLS |
| 181 | GNVLSYTFQV KINNDFNYEF YNSTWSYVKH TSTEHTSSSR KRSFFRSSSS SSRSYTSHTN |
| 241 | EIHKGKSYQL LVVENTVEVA QFINNNPEFL QLAEPFWKEL SHLPSLYDYS AYRRLIDQYG |
| 301 | THYLQSGSLG GEYRVLFYVD SEKLKQNDFN SVEEKKCKSS GWHFVVKFSS HGCKELENAL |
| 361 | KAASGTQNNV LRGEPFIRGG GAGFISGLSY LELDNPAGNK RRYSAWAESV TNLPQVIKQK |
| 421 | LTPLYELVKE VPCASVKKLY LKWALEEYLD EFDPCHCRPC QNGGLATVEG THCLCHCKPY |
| 481 | TFGAACEQGV LVGNQAGGVD GGWSCWSSWS PCVQGKKTRS RECNNPPPSG GGRSCVGETT |
| 541 | ESTQCEDEEL EHLRLLEPHC FPLSLVPTEF CPSPPALKDG FVQDEGTMFP VGKNVVYTCN |
| 601 | EGYSLIGNPV ARCGEDLRWL VGEMHCQKIA CVLPVLMDGI QSHPQKPFYT VGEKVTVSCS |
| 661 | GGMSLEGPSA FLCGSSLKWS PEMKNARCVQ KENPLTQAVP KCQRWEKLQN SRCVCKMPYE |
| 721 | CGPSLDVCAQ DERSKRILPL TVCKMHVLHC QGRNYTLTGR DSCTLPASAE KACGACPLWG |
| 781 | KCDAESSKCV CREASECEEE GFSICVEVNG KEQTMSECEA GALRCRGQSI SVTSIRPCAA |
| 841 | ETQ |

SEQ ID NO: 319
C8 ALPHA SUBUNIT
NP_000553.1

| | |
|---|---|
| 1 | MFAVVFFILS LMTCQPGVTA QEKVNQRVRR AATPAAVTCQ LSNWSEWTDC FPCQDKKYRH |
| 61 | RSLLQPNKFG GTICSGDIWD QASCSSSTTC VRQAQCGQDF QCKETGRCLK RHLVCNGDQD |
| 121 | CLDGSDEDDC EDVRAIDEDC SQYEPIPGSQ KAALGYNILT QEDAQSVYDA SYYGGQCETV |
| 181 | YNGEWRELRY DSTCERLYYG DDEKYFRKPY NFLKYHFEAL ADTGISSEFY DNANDLLSKV |
| 241 | KKDKSDSFGV TIGIGPAGSP LLVGVGVSHS QDTSFLNELN KYNEKKFIFT RIFTKVQTAH |
| 301 | FKMRKDDIML DEGMLQSLME LPDQYNYGMY AKFINDYGTH YITSGSMGGI YEYILVIDKA |
| 361 | KMESLGITSR DITTCFGGSL GIQYEDKINV GGGLSGDHCK KFGGGKTERA RKAMAVEDII |
| 421 | SRVRGGSSGW SGGLAQNRST ITYRSWGRSL KYNPVVIDFE MQPIHEVLRH TSLGPLEAKR |
| 481 | QNLRRALDQY LMEFNACRCG PCFNNGVPIL EGTSCRCQCR LGSLGAACEQ TQTEGAKADG |
| 541 | SWSCWSSWSV CRAGIQERRR ECDNPAPQNG GASCPGRKVQ TQAC |

SEQ ID NO: 320
C8 BETA SUBUNIT
AAA51862.1

| | |
|---|---|
| 1 | MKNSRTWAWR APVELFLLCA ALGCLSLPGS RGERPHSFGS NAVNKSFAKS RQMRSVDVTL |
| 61 | MPIDCELSSW SSWTTCDPCQ KKRYRYAYLL QPSQFHGEPC NFSDKEVEDC VTNRPCGSQV |
| 121 | RCEGFVCAQT GRCVNRRLLC NGDNDCGDQS DEANCRRIYK KCQHEMDQYW GIGSLASGIN |
| 181 | LFTNSFEGPV LDHRYYAGGC SPHYILNTRF RKPYNVESYT PQTQGKYEFI LKEYESYSDF |
| 241 | ERNVTEKMAS KSGFSFGFKI PGIFELGISS QSDRGKHYIR RTKRFSHTKS VFLHARSDLE |
| 301 | VAHYKLKPRS LMLHYEFLQR VKRLPLEYSY GEYRDLFRDF GTHYITEAVL GGIYEYTLVM |
| 361 | NKEAMERGDY TLNNVHACAK NDFKIGGAIE EVYVSLGVSV GKCRGILNEI KDRNKRDTMV |
| 421 | EDLVVLVRGG ASEHITTLAY QELPTADLMQ EWGDAVQYNP AIIKVKVEPL YELVTATDFA |
| 481 | YSSTVRQNMK QALEEFQKEV SSCHCAPCQG NGVPVLKGSR CDCICPVGSQ GLACEVSYRK |
| 541 | NTPIDGKWNC WSNWSSCSGR RKTRQRQCNN PPPQNGGSPC SGPASETLDC S |

SEQ ID NO: 321
C8 GAMMA SUBUNIT
AAA51888.1

| | |
|---|---|
| 1 | MLPPGTATLL TLLLAAGSLG QKPQRPRRPA SPISTIQPKA NFDAQQFAGT WLLVAVGSAC |
| 61 | RFLQEQGHRA EATTLHVAPQ GTAMAVSTFR KLDGICWQVR QLYGDTGVLG RFLLQARGAR |
| 121 | GAVHVVVAET DYQSFAVLYL ERAGQLSVKL YARSLPVSDS VLSGFEQRVQ EAHLTEDQIF |
| 181 | YFPKYGFCEA ADQFHVLDEV RR |

### 8. EXAMPLES

### 8.1 Example 1: Bevacizumab Fab cDNA-Based Vector

[0964] A bevacizumab Fab cDNA-based vector is constructed comprising a transgene comprising bevacizumab Fab portion of the light and heavy chain cDNA sequences (SEQ ID NOs. 10 and 11, respectively). The transgene also comprises nucleic acids comprising a signal peptide chosen from the group listed in Table 1. The nucleotide sequences encoding the light chain and heavy chain are separated by IRES elements or 2A cleavage sites to create a bicistronic vector. Optionally, the vector additionally comprises a hypoxia-inducible promoter.

### 8.2 Example 2: Ranibizumab cDNA-Based Vector

[0965] A ranibizumab Fab cDNA-based vector is constructed comprising a transgene comprising ranibizumab Fab light and heavy chain cDNAs (the portions of SEQ ID NOs. 12 and 13, respectively not encoding the signal peptide). The transgene also comprises nucleic acids comprising a signal peptide chosen from the group listed in Table 1. The nucleotide sequences encoding the light chain and heavy chain are separated by IRES elements or 2A cleavage sites to create a bicistronic vector. Optionally, the vector additionally comprises a hypoxia-inducible promoter.

### 8.3 Example 3: Hyperglycosylated Bevacizumab Fab cDNA-Based Vector

[0966] A hyperglycosylated bevacizumab Fab cDNA-based vector is constructed comprising a transgene comprising bevacizumab Fab portion of the light and heavy chain cDNA sequences (SEQ ID NOs. 10 and 11, respectively) with mutations to the sequence encoding one or more of the following mutations: L118N (heavy chain), E195N (light chain), or Q160N or Q1605 (light chain). The transgene also comprises nucleic acids comprising a signal peptide chosen from the group listed in Table 1. The nucleotide sequences encoding the light chain and heavy chain are separated by IRES elements or 2A cleavage sites to create a bicistronic vector. Optionally, the vector additionally comprises a hypoxia-inducible promoter.

### 8.4 Example 4: Hyperglycosylated Ranibizumab cDNA-Based Vector

[0967] A hyperglycosylated ranibizumab Fab cDNA-based vector is constructed comprising a transgene comprising ranibizumab Fab light and heavy chain cDNAs (the portions of SEQ ID NOs.12 and 13, respectively not encoding the signal peptide), with mutations to the sequence encoding one or more of the following mutations: L118N (heavy chain), E195N (light chain), or Q160N or Q1605 (light chain). The transgene also comprises nucleic acids comprising a signal peptide chosen from the group listed in Table 1. The nucleotide sequences encoding the light chain and heavy chain are separated by IRES elements or 2A cleavage sites to create a bicistronic vector. Optionally, the vector additionally comprises a hypoxia-inducible promoter.

### 8.5 Example 5: Ranibizumab Based HuGlyFabVEGFi

[0968] A ranibizumab Fab cDNA-based vector (see Example 2) is expressed in the PER.C6® Cell Line (Lonza) in the AAV8 background. The resultant product, ranibizumab-based HuGlyFabVEGFi is determined to be stably produced. N-glycosylation of the HuGlyFabVEGFi is confirmed by hydrazinolysis and MS/MS analysis. See, e.g., Bondt et al., Mol. & Cell. Proteomics 13.11:3029-3039. Based on glycan analysis, HuGlyFabVEGFi is confirmed to be N-glycosylated, with 2,6 sialic acid a predominant modification. Advantageous properties of the N-glycosylated HuGlyFabVEGFi are determined using methods known in the art. The HuGlyFabVEGFi can be found to have increased stability and increased affinity for its antigen (VEGF). See Sola and Griebenow, 2009, J Pharm Sci., 98(4): 1223-1245 for methods of assessing stability and Wright et al., 1991, EMBO J. 10:2717-2723 and Leibiger et al., 1999, Biochem. J. 338:529-538 for methods of assessing affinity.

### 8.6 Example 6: Treatment of Wet AMD with Ranibizumab Based HuGlyFabVEGFi by Peripheral Injection

[0969] Based on determination of advantageous characteristics of ranibizumab-based HuGlyFabVEGFi (see Example 5), a ranibizumab Fab cDNA-based vector is deemed useful for treatment of wet AMD when expressed as a transgene. A subject presenting with wet AMD is administered AAV8 that encodes ranibizumab Fab at a dose sufficient to produce a concentration of the transgene product at a Cmin of at least 0.330 μg/mL in the Vitreous humour for three months. The administration is done by subretinal administration via peripheral injection into the retina (i.e., peripheral to the optic disc, fovea and macula located in the back of the eye), which is accomplished by transvitreal injection. Following treatment, the subject is evaluated for improvement in symptoms of wet AMD.

### 8.7 Example 7: Palmitoyl-Protein Thioesterase 1 cDNA-Based Vector

[0970] A Palmitoyl-Protein Thioesterase 1 (PPT1) cDNA-based vector is constructed comprising a transgene comprising the nucleotide sequences corresponding to the amino acid sequence of SEQ ID NO. 273. Optionally, the vector additionally comprises a hypoxia-inducible promoter.

### 8.8 Example 8: Treatment of Batten-CLN1-Associated Vision Loss with

[0971] Palmitoyl-Protein Thioesterase 1 cDNA-Based Vector by Peripheral Injection

[0972] A subject presenting with Batten-CLN1-associated vision loss is administered AAV8 or AAV9 that encodes Palmitoyl-Protein Thioesterase 1 at a dose sufficient to produce a therapeutically effective concentration of the transgene product in the vitreous humour for three months. The administration is done by subretinal administration via peripheral injection into the retina (i.e., peripheral to the optic disc, fovea and macula located in the back of the eye), which is accomplished by transvitreal injection. Following treatment, the subject is evaluated for improvement in Batten-CLN1-associated vision loss.

[0973] Effects of the methods provided herein on visual deficits are measured by one or more visual acuity screenings, including OptoKinetic Nystagmus (OKN). OKN visual acuity screening uses the principles of the OKN involuntary reflex to objectively assess whether a patient's eyes can follow a moving target. By using OKN, no verbal communication is needed between the tester and the patient. As such, OKN is used to measure visual acuity in pre-verbal and/or non-verbal patients, including patients that are 1 month old, 2 months old, 3 months old, 4 months old, 5 months old, 6 months old, 7 months old, 8 months old, 9 months old, 10 months old, 11 months old, 1 year old, 1.5 years old, 2 years old, 2.5 years old, 3 years old, 3.5 years old, 4 years old, 4.5 years old, or 5 years old. The percentage change in OKN screening results before and after the said treatment is calculated.

### 8.9 Example 9: Treatment of Batten-CLN1-Associated Vision Loss with Palmitoyl-Protein Thioesterase 1 cDNA-Based Vector by Suprachoroidal Injection

[0974] A subject presenting with Batten-CLN1-associated vision loss is administered AAV8 or AAV9 that encodes Palmitoyl-Protein Thioesterase 1 at a dose sufficient to produce a therapeutically effective concentration of the transgene product in the vitreous humour for three months. The administration is done by administration to the suprachoroidal space. Following treatment, the subject is evaluated for improvement in Batten-CLN1-associated vision loss.

[0975] Effects of the methods provided herein on visual deficits are measured by one or more visual acuity screenings, including OptoKinetic Nystagmus (OKN). OKN visual acuity screening uses the principles of the OKN involuntary reflex to objectively assess whether a patient's eyes can follow a moving target. By using OKN, no verbal communication is needed between the tester and the patient. As such, OKN is used to measure visual acuity in pre-verbal and/or non-verbal patients, including patients that are 1 month old, 2 months old, 3 months old, 4 months old, 5 months old, 6 months old, 7 months old, 8 months old, 9 months old, 10 months old, 11 months old, 1 year old, 1.5 years old, 2 years old, 2.5 years old, 3 years old, 3.5 years old, 4 years old, 4.5 years old, or 5 years old. The percentage change in OKN screening results before and after the said treatment is calculated.

### 8.10 Example 10: Treatment of Batten-CLN1-Associated Vision Loss with Palmitoyl-Protein Thioesterase 1 cDNA-Based Vector by Subretinal Injection Via Vitrectomy

[0976] A subject presenting with Batten-CLN1-associated vision loss is administered AAV8 or AAV9 that encodes Palmitoyl-Protein Thioesterase 1 at a dose sufficient to produce a therapeutically effective concentration of the transgene product in the vitreous humour for three months. The administration is done by administration to the subretinal space via vitrectomy. Following treatment, the subject is evaluated for improvement in Batten-CLN1-associated vision loss.

[0977] Effects of the methods provided herein on visual deficits are measured by one or more visual acuity screenings, including OptoKinetic Nystagmus (OKN). OKN visual acuity screening uses the principles of the OKN involuntary reflex to objectively assess whether a patient's eyes can follow a moving target. By using OKN, no verbal communication is needed between the tester and the patient. As such, OKN is used to measure visual acuity in pre-verbal and/or non-verbal patients, including patients that are 1 month old, 2 months old, 3 months old, 4 months old, 5 months old, 6 months old, 7 months old, 8 months old, 9 months old, 10 months old, 11 months old, 1 year old, 1.5 years old, 2 years old, 2.5 years old, 3 years old, 3.5 years old, 4 years old, 4.5 years old, or 5 years old. The percentage change in OKN screening results before and after the said treatment is calculated.

### 8.11 Example 11: Treatment of Batten-CLN1-Associated Vision Loss with Palmitoyl-Protein Thioesterase 1 cDNA-Based Vector by Subretinal Administrate Via the Suprachoroidal Space

[0978] A subject presenting with Batten-CLN1-associated vision loss is administered AAV8 or AAV9 that encodes Palmitoyl-Protein Thioesterase 1 at a dose sufficient to produce a therapeutically effective concentration of the transgene product in the vitreous humour for three months. The administration is done by administration to the subretinal space via the suprachoroidal space. Following treatment, the subject is evaluated for improvement in Batten-CLN1-associated vision loss.

[0979] Effects of the methods provided herein on visual deficits are measured by one or more visual acuity screenings, including OptoKinetic Nystagmus (OKN). OKN visual acuity screening uses the principles of the OKN involuntary reflex to objectively assess whether a patient's eyes can follow a moving target. By using OKN, no verbal communication is needed between the tester and the patient. As such, OKN is used to measure visual acuity in pre-verbal and/or non-verbal patients, including patients that are 1 month old, 2 months old, 3 months old, 4 months old, 5 months old, 6 months old, 7 months old, 8 months old, 9 months old, 10 months old, 11 months old, 1 year old, 1.5 years old, 2 years old, 2.5 years old, 3 years old, 3.5 years old, 4 years old, 4.5 years old, or 5 years old. The percentage change in OKN screening results before and after the said treatment is calculated.

### 8.12 Example 12: Tripeptidyl-Peptidase 1 (TPP1) cDNA-Based Vector

[0980] A Tripeptidyl-Peptidase 1 (TPP1) cDNA-based vector is constructed comprising a transgene comprising the nucleotide sequences corresponding to the amino acid sequence of SEQ ID NO. 274. Optionally, the vector additionally comprises a hypoxia-inducible promoter.

### 8.13 Example 13: Treatment of Batten-CLN2-Associated Vision Loss with Tripeptidyl-Peptidase 1 (TPP1) cDNA-Based Vector by Peripheral Injection

[0981] A subject presenting with Batten-CLN2-associated vision loss is administered AAV8 or AAV9 that encodes Tripeptidyl-Peptidase 1 at a dose sufficient to produce a therapeutically effective concentration of the transgene product in the vitreous humour for three months. The administration is done by subretinal administration via peripheral injection into the retina (i.e., peripheral to the optic disc, fovea and macula located in the back of the eye), which is accomplished by transvitreal injection. Following treatment, the subject is evaluated for improvement in Batten-CLN2-associated vision loss.

[0982] Effects of the methods provided herein on visual deficits are measured by one or more visual acuity screenings, including OptoKinetic Nystagmus (OKN). OKN visual acuity screening uses the principles of the OKN involuntary reflex to objectively assess whether a patient's eyes can follow a moving target. By using OKN, no verbal communication is needed between the tester and the patient. As such, OKN is used to measure visual acuity in pre-verbal and/or non-verbal patients, including patients that are 1 month old, 2 months old, 3 months old, 4 months old, 5 months old, 6 months old, 7 months old, 8 months old, 9 months old, 10 months old, 11 months old, 1 year old, 1.5 years old, 2 years old, 2.5 years old, 3 years old, 3.5 years old, 4 years old, 4.5 years old, or 5 years old. The percentage change in OKN screening results before and after the said treatment is calculated.

### 8.14 Example 14: Treatment of Batten-CLN2-Associated Vision Loss with Tripeptidyl-Peptidase 1 (TPP1) cDNA-Based Vector by Suprachoroidal Injection

[0983] A subject presenting with Batten-CLN2-associated vision loss is administered AAV8 or AAV9 that encodes Tripeptidyl-Peptidase 1 at a dose sufficient to produce a therapeutically effective concentration of the transgene product in the vitreous humour for three months. The administration is done by administration to the suprachoroidal space. Following treatment, the subject is evaluated for improvement in Batten-CLN2-associated vision loss.

[0984] Effects of the methods provided herein on visual deficits are measured by one or more visual acuity screenings, including OptoKinetic Nystagmus (OKN). OKN visual acuity screening uses the principles of the OKN involuntary reflex to objectively assess whether a patient's eyes can follow a moving target. By using OKN, no verbal communication is needed between the tester and the patient. As such, OKN is used to measure visual acuity in pre-verbal and/or non-verbal patients, including patients that are 1 month old, 2 months old, 3 months old, 4 months old, 5 months old, 6 months old, 7 months old, 8 months old, 9 months old, 10 months old, 11 months old, 1 year old, 1.5 years old, 2 years old, 2.5 years old, 3 years old, 3.5 years old, 4 years old, 4.5 years old, or 5 years old. The percentage change in OKN screening results before and after the said treatment is calculated.

### 8.15 Example 15: Treatment of Batten-CLN2-Associated Vision Loss with Tripeptidyl-Peptidase 1 cDNA-Based Vector by Subretinal Injection via Vitrectomy

[0985] A subject presenting with Batten-CLN2-associated vision loss is administered AAV8 or AAV9 that encodes Tripeptidyl-Peptidase 1 at a dose sufficient to produce a therapeutically effective concentration of the transgene product in the vitreous humour for three months. The administration is done by administration to the subretinal space via vitrectomy. Following treatment, the subject is evaluated for improvement in Batten-CLN2-associated vision loss.

[0986] Effects of the methods provided herein on visual deficits are measured by one or more visual acuity screenings, including OptoKinetic Nystagmus (OKN). OKN visual acuity screening uses the principles of the OKN involuntary reflex to objectively assess whether a patient's eyes can follow a moving target. By using OKN, no verbal communication is needed between the tester and the patient. As such, OKN is used to measure visual acuity in pre-verbal and/or non-verbal patients, including patients that are 1 month old, 2 months old, 3 months old, 4 months old, 5 months old, 6 months old, 7 months old, 8 months old, 9 months old, 10 months old, 11 months old, 1 year old, 1.5 years old, 2 years old, 2.5 years old, 3 years old, 3.5 years old, 4 years old, 4.5 years old, or 5 years old. The percentage change in OKN screening results before and after the said treatment is calculated.

### 8.16 Example 16: Treatment of Batten-CLN2-Associated Vision Loss with Tripeptidyl-Peptidase 1 cDNA-Based Vector by Subretinal Administrate Via the Suprachoroidal Space

[0987] A subject presenting with Batten-CLN2-associated vision loss is administered AAV8 or AAV9 that encodes Tripeptidyl-Peptidase 1 at a dose sufficient to produce a therapeutically effective concentration of the transgene product in the vitreous humour for three months. The administration is done by administration to the subretinal space via the suprachoroidal space. Following treatment, the subject is evaluated for improvement in Batten-CLN2-associated vision loss.

[0988] Effects of the methods provided herein on visual deficits are measured by one or more visual acuity screenings, including OptoKinetic Nystagmus (OKN). OKN visual acuity screening uses the principles of the OKN involuntary reflex to objectively assess whether a patient's eyes can follow a moving target. By using OKN, no verbal communication is needed between the tester and the patient. As such, OKN is used to measure visual acuity in pre-verbal and/or non-verbal patients, including patients that are 1 month old, 2 months old, 3 months old, 4 months old, 5 months old, 6 months old, 7 months old, 8 months old, 9 months old, 10 months old, 11 months old, 1 year old, 1.5 years old, 2 years old, 2.5 years old, 3 years old, 3.5 years old, 4 years old, 4.5 years old, or 5 years old. The percentage change in OKN screening results before and after the said treatment is calculated.

### 8.17 Example 17: A Randomized, Partially Masked, Controlled, Phase 2b Clinical Study to Evaluate the Safety and Efficacy of Construct II Gene Therapy in Participants with nAMD

[0989] 8.17.1 Synopsis

[0990] Primary Objectives.

[0991] To evaluate mean change in best-corrected visual acuity (BCVA) for Construct II compared with ranibizumab at Week 50.

[0992] Secondary Objectives.

[0993] To evaluate the safety and tolerability of Construct II through Week 102. To evaluate the effect of Construct II on BCVA. To evaluate the effect of Construct II on central retinal thickness (CRT) as measured by spectral domain-optical coherence tomography (SD-OCT). To assess the need for supplemental anti-vascular endothelial growth factor (VEGF) therapy in the Construct II treatment arms. To assess aqueous protein concentrations of Construct II. To evaluate the immunogenicity of Construct II.

[0994] Exploratory Objectives.

[0995] To evaluate changes over time in the area of geographic atrophy and to assess, in participants with no evidence at baseline, the incidence of new areas of geographic atrophy. To assess the proportion of participants with no fluid on SD-OCT. To assess aqueous VEGF-A concentrations. To evaluate visual function and treatment satisfaction using patient reported outcome (PRO) questionnaires

[0996] Study Design.

[0997] This phase 2b partially masked, randomized, multicenter study will include 3 periods: an Active Run-in Period (i.e., screening), a Treatment Period, and an Extension Period. Participants who receive Construct II will be asked to participate in a long-term follow-up study after completion of or early discontinuation from the current study and will sign a separate informed consent for the follow-up study at that time.

[0998] The Active Run-in Period, which will last up to 10 weeks, will begin when the participant signs the informed consent form and will end once the participant has been evaluated for eligibility and has received 3 monthly intravitreal injections of ranibizumab 0.5 mg. The Treatment Period will last up to 12 months, beginning when the participant is randomized to study treatment and ending at Week 50. The Extension Period will last up to 12 months, beginning after Week 50 and ending at Week 102.

[0999] At Screening Visit 1 (Week −10), participants who meet the inclusion/exclusion criteria will enter the study and receive a 0.5-mg intravitreal injection of ranibizumab in the study eye. At Screening Visit 2 (Week −6), participants will receive a second 0.5-mg intravitreal injection of ranibizumab in the study eye. One week later, at Screening Visit 3 (Week −5), participants' anatomic response on SD-OCT will be evaluated against prespecified response criteria. Participants not meeting response criteria will be exited from the study. If participants meet all inclusion criteria, at Screening Visit 4 (Week −2), participants will be randomized. Any participants who withdraw or become ineligible for randomization during the Screening Period and have an adverse event (AE) associated with the intravitreal ranibizumab injections will be followed until the AE resolves (up to 30 days postinjection). Participants who are identified at Screening Visit 4 as being eligible will receive a third 0.5-mg intravitreal injection of ranibizumab in the study eye. Once the Central Reading Center (CRC) has verified the CRT, participants will be randomized (1:1:1) using an interactive response technology system to receive a single dose of Construct II (Dose 1), a single dose of Construct II (Dose 2), or monthly intravitreal ranibizumab 0.5 mg; Construct II will be administered by subretinal delivery. Participants will be stratified by baseline (Screening Visit 4) BCVA score (>58 letters vs ≤58 letters) in the randomization.

[1000] Participants randomized to the Construct II treatment arms will undergo the surgical procedure on Day 1 followed by visits on Day 2 and Day 8 to assess postoperative safety. At Week 2, participants will receive intravitreal ranibizumab to supplement any anti-VEGF that may have been removed during the vitrectomy surgery and to provide anti-VEGF therapy coverage while potential production of the gene therapy mediated protein escalates. The participants will then be seen at monthly intervals, beginning with Week 6, during which supplemental intravitreal ranibizumab 0.5-mg therapy may be administered if needed, as determined by the fully masked CRC evaluation of the SD-OCT data and the fully masked visual acuity assessor's evaluation of BCVA. Note that the SD-OCT and BCVA results from the masked assessors, together with predefined retreatment criteria, will inform the investigator's decision to provide supplemental anti-VEGF therapy.

[1001] Participants randomized to the ranibizumab control arm will have their first postrandomization visit at Week 2 and will receive intravitreal ranibizumab 0.5 mg. Following the Week 2 visit, the participants will have monthly (˜28 day) study visits during which they will receive an intravitreal injection of ranibizumab 0.5 mg.

[1002] At the Week 50 primary endpoint, participants in the ranibizumab control arm will be offered the opportunity to receive Construct II treatment if they still meet key inclusion/exclusion criteria. The treating physician will determine if the participant is eligible and a good candidate for the procedure. Qualified participants will then be administered the highest tolerated dose evaluated in this protocol. Participants in the ranibizumab control arm who switch to Construct II following Week 50 will follow the same visit schedule as the one started on Day 1 for participants originally randomized to receive Construct II. Those participants who either choose not to have treatment with Construct II or are ineligible for treatment with Construct II will be discontinued from the study.

[1003] Throughout the study, participants will be evaluated through the assessment of ocular and nonocular AEs including serious adverse events (SAEs) and adverse events of special interest (AESIs) (ocular inflammation deemed by the investigator to be unrelated to the surgical/study procedure and is graded as 2+ or greater on the ocular inflammation grading scales, ocular infections [including endophthalmitis], retinal tears or detachment, retinal thinning, and new arterial thromboembolic events [nonfatal stroke, nonfatal myocardial infarction, or vascular death (including deaths of unknown cause)]), as well as assessments of clinical laboratory testing (chemistry, hematology, coagulation, urinalysis), ocular examinations and imaging (BCVA, intraocular pressure, slit-lamp biomicroscopy, indirect ophthalmoscopy, fluorescein angiography [FA], fundus autofluorescence [FAF], and SD-OCT), and vital signs. Note that AEs will be collected at all study visits. Immunogenicity to the vector and transgene product (TP) of Construct II will also be assessed. Patient reported outcomes will be collected using the supplemented National Eye Institute Visual Functioning Questionnaire 25-item version (NEI-VFQ-25) (also comprises the Rasch-scored version, NEI-VFQ-28-R) and Macular Disease Treatment Satisfaction Questionnaire (MacTSQ).

[1004] Planned safety monitoring of the study participants will be conducted on an ongoing basis. These include reviews conducted by the partially masked Medical Monitor and routine reviews conducted by the partially masked Sponsor's Internal Safety Committee. Separately, an Independent Data Monitoring Committee (IDMC) will also be established and will meet on a periodic basis to independently review the clinical data. If unmasked reviews are needed to understand a potential safety signal, these reviews will be conducted by the IDMC.

[1005] Diagnosis and Main Criteria for Inclusion.

[1006] To be eligible for enrollment in this study, participants, aged ≥50 and ≤89 years, must have a diagnosis of subfoveal choroidal neovascularization secondary to age-related macular degeneration in the study eye. Optical coherence tomography documentation from a current image of center subfield fluid must be confirmed by the CRC. Participants must have a BCVA letter score in the study eye between ≤78 and ≥44 and be pseudophakic (status postcataract surgery) in the study eye. Participants also must be willing and able to provide written, signed informed consent for this study after the nature of the study has been explained, and prior to any research-related procedures being conducted.

[1007] Investigational Product, Dosage, and Mode of Administration.

[1008] Construct II Dose 1: 1.6×10¹¹ GC/eye (6.2×10¹¹ GC/mL). Construct II Dose 2: 2.5×10¹¹ GC/eye (1.0×10¹² GC/mL). Construct II is administered via subretinal delivery (250 μL in a single dose).

[1009] Duration of Treatment.

[1010] In the Construct II treatment arms: 1 day. In the ranibizumab control arm: 50 weeks

[1011] Reference Therapy, Dosage and Mode of Administration.

[1012] Ranibizumab (LUCENTIS®, Genentech) 0.5 mg (0.05 mL of 10 mg/mL solution) will be administered by intravitreal injection approximately every 28 days.

[1013] Intravitreal ranibizumab 0.5 mg will also be administered as supplemental anti-VEGF therapy in all treatment arms during the Run-in Period (Screening Visits 1, 2, and 4) and at Week 2. Participants in the Construct II arm will be evaluated for intravitreal ranibizumab 0.5 mg as supplemental anti-VEGF therapy starting at Week 6 according to retreatment criteria; participants in the ranibizumab control arm who switch to Construct II after Week 50 will receive intravitreal ranibizumab 0.5 mg at Week 54 and will be evaluated for intravitreal ranibizumab 0.5 mg as supplemental anti-VEGF therapy starting at Week 58 according to retreatment criteria.

[1014] Criteria for Evaluation.

[1015] Primary Endpoint:

[1016] Mean change from baseline in BCVA to Week 50 (as the average of Week 46 and Week 50) based on the Early Treatment Diabetic Retinopathy Study (ETDRS) score

[1017] Secondary Endpoints:

[1018] Incidences of ocular and nonocular AEs over 50 weeks.

[1019] Incidences of ocular and nonocular AEs over 102 weeks.

[1020] Mean change from baseline in BCVA to Week 102 (as the average of Week 98 and Week 102).

[1021] Proportion of participants with BCVA of 43 letters (20/160 approximate Snellen equivalent) or worse at Week 50 (as the average of Week 46 and Week 50) and Week 102 (as the average of Week 98 and Week 102).

[1022] Proportion of participants with BCVA of 84 letters (20/20 approximate Snellen equivalent) or better at Week 50 (as the average of Week 46 and Week 50) and Week 102 (as the average of Week 98 and Week 102).

[1023] Proportion of participants (1) gaining or losing ≥15, ≥10, ≥5, or ≥0 letters; (2) maintaining vision (not losing ≥15 letters) compared with baseline as per BCVA at Week 50 (as the average of Week 46 and Week 50) and Week 102 (as the average of Week 98 and Week 102).

[1024] Mean change from baseline in BCVA to Week 50 (as the average of Week 46 and Week 50) for participants who received ≤2 supplemental anti-VEGF injections, 2 supplemental anti-VEGF injections, 1 supplemental anti-VEGF injection, or 0 supplemental anti-VEGF injections (Construct II randomized participants).

[1025] Mean change from Week 50 to Week 102 (as the average of Week 98 and Week 102) in BCVA (control arm participants who switch to Construct II).

[1026] Mean change from baseline in CRT as measured by SD-OCT to Week 50 (as the average of Week 46 and Week 50) and Week 102 (as the average of Week 98 and Week 102).

[1027] Mean change from Week 50 to Week 102 (as the average of Week 98 and Week 102) in CRT as measured by SD-OCT (control arm participants who switch to Construct II).

[1028] Proportion of participants who have a reduction of ≥50% in supplemental anti-VEGF injection rate through Week 50 and Week 102 compared with the prior 50 weeks preceding the first intravitreal ranibizumab injection received as part of the Active Run-in Period (Construct II randomized participants).

[1029] Mean reduction in supplemental anti VEGF injection rate through Week 50 and Week 102 compared with the prior 50 weeks preceding the first ranibizumab injection received as part of the Active Run-in Period (Construct II randomized participants).

[1030] Mean number of supplemental anti-VEGF injections in the Construct II arms through Week 50 and Week 102; Mean number of supplemental anti-VEGF injections after Week 50 through Week 102 relative to the prior 50 weeks in the study (control arm participants who switch to Construct II).

[1031] Time to first supplemental anti-VEGF injection after the Week 2 injection in the Construct II arms.

[1032] Proportion of participants in the Construct II arms who receive supplemental anti-VEGF injection after Week 2 through Week 26, after Week 26 through Week 50, after Week 50 through Week 74, after Week 74 through Week 102, after Week 2 through Week 50, and after Week 2 through Week 10

[1033] Aqueous Construct II TP concentrations at assessed time points; Immunogenicity measurements (serum neutralizing antibodies to AAV8 and serum antibodies to Construct II TP) at assessed time points.

[1034] Exploratory Endpoints:

[1035] Mean change from baseline in area of geographic atrophy based on FAF at assessed time points.

[1036] Incidence of new area of geographic atrophy by FAF (in participants with no geographic atrophy at baseline).

[1037] Incidence of retinal thinning in the area of the bleb.

[1038] Proportion of participants with no fluid on SD-OCT.

[1039] VEGF-A concentrations (aqueous) at assessed time points.

[1040] Mean change from baseline in NEI-VFQ-28-R (composite score; activity limitation domain score; and socio-emotional functioning domain score) at assessed time points.

[1041] Mean change from baseline in NEI-VFQ-25 (composite score and mental health subscale score) at assessed time points.

[1042] Mean change from baseline in MacTSQ (composite score; safety, efficacy, and discomfort domain score; and information provision and convenience domain score) at assessed time points.

TABLE 3
Objectives and Endpoints

| | |
|---|---|
| Objectives | Endpoints |

Primary

| | | |
|---|---|---|
| Efficacy | To evaluate mean change | Mean change from baseline in BCVA to Week 50 |
| | in BCVA for Construct II | (as the average of Week 46 and Week 50) based on |
| | compared with | the ETDRS score |
| | ranibizumab at Week 50 | |

Secondary

| | | |
|---|---|---|
| Safety | To evaluate the safety and | Incidences of ocular and nonocular AEs over 50 |
| | tolerability of Construct II | weeks |
| | through Week 102 | Incidences of ocular and nonocular AEs over |
| | | 102 weeks |
| Efficacy | To evaluate the | Mean change from baseline in BCVA to Week 102 |
| | effect of Construct | (as the average of Week 98 and Week 102) |
| | II on BCVA | Proportion of participants with BCVA of 43 letters |
| | | (20/160 approximate Snellen equivalent) or worse |
| | | at Week 50 (as the average of Week 46 and Week |
| | | 50) and Week 102 (as the average of Week 98 and |
| | | Week 102) |
| | | Proportion of participants with BCVA of 84 letters |
| | | (20/20 approximate Snellen equivalent) or better at |
| | | Week 50 (as the average of Week 46 and Week 50) |
| | | and Week 102 (as the average of Week 98 and |
| | | Week 102) |
| | | Proportion of participants (1) gaining or |
| | | losing ≥15, ≥10, ≥5, or ≥0 letters; |
| | | (2) maintaining vision (not losing ≥15 |
| | | letters) compared with baseline as |
| | | per BCVA at Week 50 (as the average of Week 46 |
| | | and Week 50) and Week 102 (as the average of |
| | | Week 98 and Week 102) |
| | | Mean change from baseline in BCVA to Week 50 |
| | | (as the average of Week 46 and Week 50) for |
| | | participants who received ≤2 supplemental anti- |
| | | VEGF injections, 2 supplemental anti-VEGF |
| | | injections, 1 supplemental anti-VEGF injection, or |
| | | 0 supplemental anti- VEGF injections (Construct II |
| | | randomized participants) |
| | | Mean change from Week 50 to Week 102 (as the |
| | | average of Week 98 and Week 102) in BCVA |
| | | (control arm participants who switch to Construct II) |
| Efficacy | To evaluate the effect of | Mean change from baseline in CRT as measured by |
| | Construct II on CRT as | SD-OCT to Week 50 (as the average of Week 46 |
| | measured by SD-OCT | and Week 50) and Week 102 (as the average of |
| | | Week 98 and Week 102) |
| | | Mean change from Week 50 to Week 102 (as the |
| | | average of Week 98 and Week 102) in CRT as |
| | | measured by SD-OCT (control arm participants who |
| | | switch to Construct II) |
| Efficacy | To assess the need | Proportion of participants who have a reduction |
| | for supplemental | of ≥50% in supplemental anti-VEGF injection rate |
| | anti-VEGF therapy | through Week 50 and Week 102 compared with the |
| | in the Construct II | prior 50 weeks preceding the first ranibizumab |
| | treatment arms | injection received as part of the Active Run-in |
| | | Period (Construct II randomized participants) |
| | | Mean reduction in supplemental anti-VEGF |
| | | injection rate through Week 50 and Week 102 |
| | | compared with the prior 50 weeks preceding |
| | | the first ranibizumab injection received as part |
| | | of the Active Run-in Period (Construct II |
| | | randomized participants) |
| | | Mean number of supplemental anti-VEGF injections |
| | | in the Construct II arms through Week 50 and Week |
| | | 102 |
| | | Mean number of supplemental anti-VEGF injections |
| | | after Week 50 through Week 102 relative to the prior |
| | | 50 weeks in the study (control arm participants who |
| | | switch to Construct II) |
| | | Time to first supplemental anti-VEGF injection after |
| | | the Week 2 injection in the Construct II arms |
| | | Proportion of participants in the Construct II arm |
| | | who receive supplemental anti-VEGF injection |
| | | after Week 2 through Week 26, after Week 26 |
| | | through Week 50, after Week 50 through Week |
| | | 74, after Week 74 through Week 102, after Week |
| | | 2 through Week 50, and after Week 2 through |
| | | Week 102 |
| Pharmacodynamics | To assess aqueous | Aqueous Construct II TP concentrations at assessed |
| | protein concentrations | time points |
| | of Construct II | |
| Immunogenicity | To evaluate the | Immunogenicity measurements (serum |
| | immunogenicity of | neutralizing antibodies to AAV8 and serum |
| | Construct II | antibodies to Construct II TP) at assessed time |
| | | points |
| Efficacy | To evaluate changes over | Mean change from baseline in area of geographic |
| | time in the area of | atrophy based on FAF at assessed time points |
| | geographic atrophy and to | Incidence of new area of geographic atrophy by |
| | assess, in participants with | FAF (in participants with no geographic atrophy at |
| | no evidence at baseline, the | baseline) |
| | incidence of new areas of | Incidence of retinal thinning in the area of the |
| | geographic atrophy | bleb |
| Efficacy | To assess the | Proportion of participants with no fluid on SD- |
| | proportion of | OCT |
| | participants with no | |
| | fluid on SD-OCT | |
| Biomarkers | To assess aqueous | VEGF-A concentrations (aqueous) at assessed |
| | VEGF-A | time points |
| | concentrations | |
| PRO | To evaluate visual function | Mean change from baseline in NEI-VFQ-28-R |
| Questionnaires | and treatment satisfaction | (composite score; activity limitation domain |
| | using PRO questionnaires | score; and socio-emotional functioning domain |
| | | score) at assessed time points |
| | | Mean change from baseline in NEI-VFQ-25 |
| | | (composite score and mental health subscale score) |
| | | at assessed time points |
| | | Mean change from baseline in MacTSQ |
| | | (composite score; safety, efficacy, and discomfort |
| | | domain score; and information provision and |
| | | convenience domain score) at assessed time points |

AAV8 = adeno-associated virus serotype 8;
AE = adverse event;
BCVA = best-corrected visual acuity;
CRT = central retinal thickness;
ETDRS = Early Treatment Diabetic Retinopathy Study;
FAF = fundus autofluorescence;
MacTSQ = Macular Disease Treatment Satisfaction Questionnaire;
NEI-VFQ-25 = National Eye Institute Visual Functioning Questionnaire 25-item Version;
NEI-VFQ-28-R = National Eye Institute Visual Functioning Questionnaire 28-item Rasch-scored Version;
PRO = patient reported outcome;
SD-OCT = spectral domain-optical coherence tomography;
TP = transgene product;
VEGF = vascular endothelial growth factor

[1043] 8.17.2 Study Design

[1044] Overall Study Design

[1045] This phase 2b partially masked, randomized, multicenter study will include 3 periods: an Active Run-in Period (i.e., screening), a Treatment Period, and an Extension Period. Participants who receive Construct II will be asked to participate in a long-term follow-up study after completion of or early discontinuation from the current study and will sign a separate informed consent for the follow-up study at that time.

[1046] The Active Run-in Period, which will last up to 10 weeks, will begin when the participant signs the Informed consent form (ICF) and will end once the participant has been evaluated for eligibility and has received 3 monthly injections of intravitreal ranibizumab. The Treatment Period will last up to 12 months, beginning when the participant is randomized to study treatment and ending at Week 50. The Extension Period will last up to 12 months, beginning after Week 50 and ending at Week 102.

[1047] At Screening Visit 1 (Week −10), participants who meet the inclusion/exclusion criteria will enter the study and receive a 0.5-mg intravitreal injection of ranibizumab in the study eye. At Screening Visit 2 (Week −6), participants will receive a second 0.5-mg intravitreal injection of ranibizumab in the study eye. One week later, at Screening Visit 3 (Week −5), participants' anatomic response on SD-OCT will be evaluated against prespecified response criteria. Participants not meeting response criteria will be exited from the study. If participants meet all inclusion criteria, at Screening Visit 4 (Week −2), participants will be randomized. Any participants who withdraw or become ineligible for randomization during the Screening Period and have an AE associated with the intravitreal ranibizumab injections will be followed until the AE resolves (up to 30 days postinjection). Participants who are identified at Screening Visit 4 as being eligible will receive a third 0.5-mg intravitreal injection of ranibizumab in the study eye. Once the Central Reading Center (CRC) has verified the central retinal thickness (CRT), participants will be randomized (1:1:1) using an interactive response technology (IRT) system to receive a single dose of Construct II (Dose 1), a single dose of Construct II (Dose 2), or monthly intravitreal ranibizumab 0.5 mg; Construct II will be administered by subretinal delivery. Participants will be stratified by baseline (Screening Visit 4) best-corrected visual acuity (BCVA) score (>58 letters vs ≤58 letters) in the randomization.

[1048] Participants randomized to the Construct II treatment arms will undergo the surgical procedure on Day 1 followed by visits on Day 2 and Day 8 to assess postoperative safety. At Week 2, participants will receive intravitreal ranibizumab to supplement any anti-VEGF that may have been removed during the vitrectomy surgery to provide anti-VEGF therapy coverage while potential production of the gene therapy mediated protein escalates. The participants will then be seen at monthly intervals, beginning with Week 6, during which supplemental intravitreal ranibizumab 0.5-mg therapy may be administered if needed, as determined by the fully masked CRC evaluation of the SD-OCT data and the fully masked VA assessor's evaluation of BCVA. Note that the SD-OCT and BCVA results, together with predefined retreatment criteria, will inform the investigator's decision to provide supplemental anti-VEGF therapy.

[1049] Participants randomized to the ranibizumab control arm will have their first postrandomization visit at Week 2 and will receive intravitreal ranibizumab 0.5 mg. Following the Week 2 visit, the participants will have monthly (˜28 day) study visits during which they will receive an injection of ranibizumab 0.5 mg.

[1050] At the Week 50 primary endpoint, participants in the ranibizumab control arm will be offered the opportunity to receive Construct II treatment if they still meet key inclusion/exclusion criteria. The treating physician will determine if the participant is eligible and a good candidate for the procedure. Qualified participants will then be administered the highest tolerated dose evaluated in this protocol. Participants in the ranibizumab control arm who switch to Construct II following Week 50 will follow the same visit schedule as the one started on Day 1 for participants originally randomized to receive Construct II. Those participants who either choose not to have treatment with Construct II or are ineligible for treatment with Construct II will be discontinued from the study.

[1051] Throughout the study, participants will be evaluated through the assessment of ocular and nonocular AEs including serious adverse events (SAEs) and adverse events of special interest (AESIs) (ocular inflammation deemed by the investigator to be unrelated to the surgical/study procedure and is graded as 2+ or greater on the ocular inflammation grading scales (see Section 8.17.7), ocular infections [including endophthalmitis], retinal tears or detachment, retinal thinning, and new arterial thromboembolic events [nonfatal stroke, nonfatal myocardial infarction, or vascular death (including deaths of unknown cause)]), as well as assessments of clinical laboratory testing (chemistry, hematology, coagulation, urinalysis), ocular examinations and imaging (BCVA, IOP, slit-lamp biomicroscopy, indirect ophthalmoscopy, fluorescein angiography [FA], fundus autofluorescence [FAF], and SD-OCT), and vital signs. Note that AEs will be collected at all study visits. Immunogenicity to the vector and TP of Construct II will also be assessed. Patient reported outcomes (PROs) will be collected using the supplemented National Eye Institute Visual Functioning Questionnaire 25-item version (NEI-VFQ-25) (also comprises the Rasch-scored version, NEI-VFQ-28-R) and Macular Disease Treatment Satisfaction Questionnaire (MacTSQ).

[1052] Planned safety monitoring of the study participants will be conducted on an ongoing basis. These include reviews conducted by the partially masked Medical Monitor and routine reviews conducted by the partially masked Sponsor's Internal Safety Committee (ISC). Separately, an Independent Data Monitoring Committee (IDMC) will also be established and will meet on a periodic basis to independently review the clinical data. If unmasked reviews are needed to understand a potential safety signal, these reviews will be conducted by the IDMC.

[1053] 8.17.3 Study Population

### (a) General Considerations

[1054] Approximately 300 participants with nAMD who meet the inclusion/exclusion criteria will be randomized. It is expected that up to 50 study centers in the United States will participate in this study. Prospective approval of protocol deviations to recruitment and enrollment criteria, also known as protocol waivers or exemptions, is not permitted.

### (b) Inclusion Criteria

[1055] Participants must meet all the following criteria in order to be eligible for this study:

[1056] 1. Males or females aged ≥50 years and ≤89 years.

[1057] 2. An Early Treatment Diabetic Retinopathy Study (ETDRS) BCVA letter score between ≤78 and ≥44 in the study eye at Screening Visit 1.

[1058] 3. If both eyes are eligible, the study eye must be the participant's worse-seeing eye, as determined by the investigator prior to randomization.

[1059] 4. Must have a diagnosis of subfoveal CNV secondary to AMD in the study eye, along with fluid within the parafovea (3-mm center of the macula, based on the early treatment diabetic retinopathy grid) at Screening Visit 1. CNV lesion characteristics as assessed by the CRC: lesion size needs to be less than 10-disc areas (typical disc area=2.54 mm²).

[1060] 5. Must be pseudophakic (at least 12 weeks postcataract surgery) in the study eye

[1061] 6. Must be willing and able to comply with all study procedures and be available for the duration of the study.

[1062] 7. Women must be postmenopausal (defined as being at least 12 consecutive months without menses) or surgically sterilized (ie, having a bilateral tubal ligation/bilateral salpingectomy, bilateral tubal occlusive procedure, hysterectomy, or bilateral oophorectomy). If not, women must have a negative serum pregnancy test at Screening Visit 1, have negative urine pregnancy test results at Screening Visit 4, and be willing to have additional pregnancy tests during the study.

[1063] 8. Women of childbearing potential (and their male partners) must be willing to use a highly effective method of contraception and male participants engaged in a sexual relationship with a woman of childbearing potential must be willing to use condoms from Screening Visit 1 until 24 weeks after Construct II administration. For the purpose of this study, highly effective methods of contraception for women of childbearing potential include the following: combined hormonal contraception associated with inhibition of ovulation (oral, intravaginal, transdermal); progestogen-only hormonal contraception associated with inhibition of ovulation (oral, injecteable, implantable); intrauterine device; intrauterine hormone-releasing system; bilateral tubal occlusion; vasectomized partner; or sexual abstinence, when it is preferred and usual lifestyle of the participant.

[1064] 9. Must be willing and able to provide written, signed informed consent.

[1065] 10. Based on the Screening Visit 3 SD-OCT, participants must have improvement in fluid (see Response Criterion below) and have a CRT <400 Note that, if the participant has disease other than fluid contributing to an increase (ie, PED or SHRM) in CRT, they will be enrolled if they have <75 μm of fluid (intraretinal or subretinal), as determined by the CRC. Response Criterion: Subjects must have an improvement in inner retinal (parafovea 3 mm) fluid relative to Screening Visit 1 of >50 μm or 30%; or an improvement in center subfield thickness of >50 μm or 30% as determined by the CRC.

### (c) Exclusion Criteria

[1066] Participants are excluded from the study if any of the following criteria apply:

[1067] 1. CNV or macular edema in the study eye secondary to any causes other than AMD.

[1068] 2. Subfoveal fibrosis or atrophy as determined by the CRC.

[1069] 3. Participants who required >10 anti-VEGF injections in the 12 months prior to the Screening Visit 1.

[1070] 4. Any condition in the investigator's opinion that could limit VA improvement in the study eye.

[1071] 5. Active or history of retinal detachment in the study eye.

[1072] 6. Advanced glaucoma in the study eye defined as IOP of >23 mmHg not controlled by 2 IOP-lowering medications or any invasive procedure to treat glaucoma (e.g., shunt, tube, or MIGS devices; selective laser trabeculectomy and argon laser trabeculoplasty are permitted).

[1073] 7. Any condition in the study eye that, in the opinion of the investigator, may increase the risk to the participant, require either medical or surgical intervention during the course of the study to prevent or treat vision loss, or interfere with study procedures or assessments.

[1074] 8. History of intraocular surgery in the study eye within 12 weeks prior to Screening Visit 1. Yttrium aluminum garnet capsulotomy is permitted if performed >10 weeks prior to the Screening Visit 1.

[1075] 9. History of intravitreal therapy in the study eye, such as intravitreal steroid injection or investigational product, other than anti-VEGF therapy, in the 6 months prior to Screening Visit 1.

[1076] 10. Presence of any implant in the study eye at Screening Visit 1 (excluding intraocular lens).

[1077] 11. History of malignancy or hematologic malignancy that may compromise the immune system requiring chemotherapy and/or radiation in the 5 years prior to Screening Visit 1. Localized basal cell carcinoma will be permitted.

[1078] 12. Receipt of any investigational product within the 30 days of enrollment or 5 half-lives of the investigational product, whichever is longer.

[1079] 13. Received gene therapy.

[1080] 14. History of retinal toxicity caused by a therapy, or concomitant therapy with any drug that may affect VA or with known retinal toxicity, e.g., chloroquine or hydroxychloroquine.

[1081] 15. Ocular or periocular infection in the study eye that may interfere with the surgical procedure.

[1082] 16. Myocardial infarction, cerebrovascular accident, or transient ischemic attack within the past 6 months.

[1083] 17. Uncontrolled hypertension (systolic blood pressure [BP] >180 mmHg, diastolic BP >100 mmHg) despite maximal medical treatment.

[1084] 18. Any participant with the following laboratory values at Screening Visit 1 will be withdrawn from study:
[1085] Aspartate aminotransferase (AST)/alanine aminotransferase (ALT) >2.5×upper limit of normal (ULN).
[1086] Total bilirubin >1.5×ULN, unless the participant has a previously known history of Gilbert's syndrome and a fractionated bilirubin that shows conjugated bilirubin <35% of total bilirubin.
[1087] Prothrombin time >1.5×ULN, unless the participant is anticoagulated. Participants who are anticoagulated will be monitored by local labs and managed per local practice to hold or bridge anticoagulant therapy for the study procedure; consultation with the Medical Monitor is also required.
[1088] Hemoglobin <10 g/dL for male participants and <9 g/dL for female participants.
[1089] Platelets <100×103/μL.
[1090] Estimated glomerular filtration rate <30 mL/min/1.73 m².

[1091] 19. Any concomitant treatment that, in the opinion of the investigator, may interfere with ocular surgical procedure or healing process.

[1092] 20. Known hypersensitivity to ranibizumab or any of its components.

[1093] 21. Has a serious, chronic, or unstable medical or psychological condition that, in the opinion of the investigator or Sponsor, may compromise the participant's safety or ability to complete all assessments and follow-up in the study.

[1094] 22. Currently taking anticoagulation therapy for which holding anticoagulation therapy for Construct II administration is not indicated or considered to be unsafe in the opinion of the treating investigator (ie, retinal surgeon), as well as the physician prescribing anticoagulation for the participant.

[1095] Criteria for Participants in the Control Arm to Obtain Construct II After Week 50

### (a) Inclusion Criteria

[1096] 1. Study eye will be the eye that qualified at randomization.

[1097] 2. Participant has a CRT <400 μm of subretinal/intraretinal fluid or (in cases where a participant may have nonfluid elevation in the CRT, eg, pigment epithelial defect)<75 μm of excess fluid, as confirmed by the masked CRC.

[1098] 3. Women of childbearing potential (and their male partners) must be willing to use a highly effective method of contraception and male participants engaged in a sexual relationship with a woman of childbearing potential must be willing to use condoms from the surgical visit until 24 weeks after Construct II administration. For the purpose of this study, highly effective methods of contraception for women of childbearing potential include the following: combined hormonal contraception associated with inhibition of ovulation (oral, intravaginal, transdermal); progestogen-only hormonal contraception associated with inhibition of ovulation (oral, injecteable, implantable); intrauterine device; intrauterine hormone-releasing system; bilateral tubal occlusion; vasectomized partner; or sexual abstinence, when it is preferred and usual lifestyle of the participant.

[1099] 4. Women of childbearing potential must have a negative urine pregnancy test at Week 52 and be willing to have additional pregnancy tests during the study.

### (b) Exclusion Criteria

[1100] 1. CNV or macular edema in the study eye secondary to any causes other than AMD.

[1101] 2. Subfoveal fibrosis or atrophy as determined by the CRC, or any condition preventing VA improvement in the study eye.

[1102] 3. Ocular or periocular infection in the study eye that may interfere with the surgical procedure.

[1103] 4. Myocardial infarction, cerebrovascular accident, or transient ischemic attacks since randomization.

[1104] 5. Uncontrolled hypertension (systolic BP >180 mmHg, diastolic BP >100 mmHg) despite maximal medical treatment.

[1105] 6. Any concomitant treatment that, in the opinion of the investigator, may interfere with ocular surgical procedure or healing process.

[1106] 7. History of malignancy or hematologic malignancy that may compromise the immune system requiring chemotherapy and/or radiation in the past year. Localized basal cell carcinoma will be permitted.

[1107] 8. Currently taking anticoagulation therapy for which holding anticoagulation therapy for Construct II administration is not indicated or considered to be unsafe in the opinion of the treating investigator as well as the physician prescribing anticoagulation for the participant.

[1108] 8.17.4 Study Intervention

[1109] Study intervention is defined as any investigational intervention(s), marketed product(s), placebo, or medical device(s) intended to be administered to a study participant according to the study protocol.

### (a) Study Intervention(s) Administered

[1110] Eligible participants will be randomized 1:1:1 to receive a single dose of Construct II (Dose 1), a single dose of Construct II (Dose 2), or monthly intravitreal injections of ranibizumab.

[1111] Participants in either of the Construct II arms will receive Construct II on Day 1 via subretinal delivery in an operating room. During the study, participants in the Construct II arms will receive ranibizumab 0.5 mg, administered by intravitreal injection, on Screening Visits 1, 2, and 4, at Week 2, and then as needed every 4 weeks starting at Week 6.

[1112] Participants in the ranibizumab control arm will receive ranibizumab 0.5 mg, administered by intravitreal injection, on Screening Visits 1, 2, and 4, at Week 2, and then monthly (˜28 days) thereafter.

TABLE 4
Study Intervention(s) Administered

| | Arm Name | | |
|---|---|---|---|
| | Construct II Dose 1 | Construct II Dose 2 | Ranibizumab (LUCENTIS) |
| Type | Gene therapy | | Drug |
| Dose | Solution | | |
| Formulation | | | |
| Unit Dose | 6.2 × 10¹¹ GC/mL | 1.0 × 10¹²GC/mL | 10 mg/mL |
| Strength | | | |
| Dose Level(s) | 250 μL | 250 μL | 0.5 mg (0.05 mL of 10 mg/mL |
| | (1.6 × 10¹¹ GC/eye) | (2.5 × 10¹¹ GC/eye) | solution) once a month |
| | one-time dose | one-time dose | (approximately every 28 days) |

| | | |
|---|---|---|
| Route of | Subretinal delivery | Intravitreal injection |
| Administration | | |
| Physical | Construct II investigational product is supplied | LUCENTIS is supplied as a |
| Description | as a frozen, sterile, single-use solution of the | preservative-free, sterile |
| | AAV vector active ingredient in a formulation | solution in a single-use |
| | buffer. The solution appears clear to opalescent, | container designed to deliver |
| | colorless, and free of visible particulates at | 0.05 mL of 10 mg/mL |
| | room temperature. | LUCENTIS (0.5 mg dose |
| | | prefilled syringe or vial) |
| | | aqueous solution. The |
| | | solution appears colorless to |
| | | pale yellow. |
| Manufacturer | Advanced Bioscience Laboratories, Inc | Genentech, Inc |
| Packaging and | Construct II will be supplied as a sterile, single- | Study intervention will be |
| Labeling | use solution in 2-mL Crystal Zenith ® vials | obtained in commercial |
| | sealed with latex free rubber stoppers and | packaging, either the prefilled |
| | aluminum flip-off seals. Each vial will be | syringe (NDC 50242-080-03) or |
| | labeled as required per country regulatory | single-use 2-mL glass vial (NDC |
| | requirements. | 50242-080-02) designed to |
| | | deliver 0.05 mL of 10 mg/mL |
| | | ranibizumab solution. |

[1113] 8.17.5 Ocular Inflammation Grading Scale

[1114] Ocular inflammation will be assessed during slit-lamp biomicroscopy and independent ophthalmoscopy and graded using the following scales. The standard practice for slit-lamp biomicroscopy and indirect ophthalmoscopy assessment should be used.

TABLE 5
Grading Scale for Ocular Inflammation: Anterior
Chamber Cells and Anterior Chamber Flare
Anterior Chamber Cells

| Grade | Cells in Field (1 mm × 1 mm slit beam) |
|---|---|
| 0 | None |
| +0.5 | 1-5 |
| +1 | 6-15 |
| +2 | 16-25 |
| +3 | 26-50 |
| +4 | >50 |

Anterior Chamber Flare

| Grade | Description |
|---|---|
| 0 | None |
| +1 | Trace |
| +2 | Moderate (iris and lens detail clear) |
| +3 | Marked (iris and lens detail hazy) |
| +4 | Intense (fibrin or plastic aqueous) |

Source: Jabs et al., 2005, Am J Ophthalmol 140(3): 509-516.

TABLE 6
Grading Scale for Vitreous Haze

| Grade | Amount of Vitreal Haze |
|---|---|
| 0 | None |
| +0.5 | Trace |
| +1 | Clear optic disc and vessels; hazy nerve fiber layer |
| +2 | Hazy optic disc and vessels |
| +3 | Optic disk visible |
| +4 | Optic disc not visible |

Source: Nussenblatt et al., 1985, Ophthalmology, 92(4): 467-471.

### 8.18 Example 18: A Phase 2, Randomized, Dose-Escalation, Ranibizumab-Controlled Study to Evaluate the Efficacy, Safety, and Tolerability of Construct II Gene Therapy Delivered Via One or Two Suprachoroidal Space (SCS) Injections in Participants with Neovascular Age-Related Macular Degeneration (nAMD)

[1115] 8.18.1 Synopsis

### (a) Objectives and Endpoints

TABLE 7
Objectives and Endpoints

| | | |
|---|---|---|
| Measure | Objectives | Endpoints |

Primary

| | | |
|---|---|---|
| Efficacy | To evaluate the mean change in | Mean change from baseline in |
| | BCVA for Construct II | BCVA to Week 40 based on the |
| | compared with ranibizumab | ETDRS score |
| | monthly at Week 40 | |

Secondary

| | | |
|---|---|---|
| Safety | To evaluate the safety and | Incidences of overall and ocular |
| | tolerability of Construct II | AEs and SAEs through |
| | | Week 52 |
| | | Vector shedding analysis in serum, |
| | | urine, and tears |
| | To evaluate the effect of | Mean change from baseline in |
| | Construct II on CNV lesion | CNV lesion size and leakage |
| | growth and leakage as | area based on FA at Week 40 |
| | measured by FA | and Week 52 |
| Efficacy | To evaluate the effect of | Mean change from baseline in |
| | Construct II on BCVA | BCVA to Week 52 |
| | | Proportion of participants (1) gaining |
| | | or losing ≥15, ≥10, ≥5, or ≥0 letters; |
| | | (2) maintaining vision (not |
| | | losing ≥15 letters) compared |
| | | with baseline as per BCVA at |
| | | Week 40 and Week 52 |
| | | Mean change from baseline in |
| | | BCVA to Week 40 and |
| | | Week 52 for participants who |
| | | received ≤2 supplemental |
| | | anti-VEGF injections, |
| | | 2 supplemental anti-VEGF |
| | | injections, 1 supplemental |
| | | anti-VEGF injection, or |
| | | 0 supplemental anti-VEGF |
| | | injections (Construct II |
| | | randomized participants) |
| | To evaluate the effect of | Mean change from baseline in CRT |
| | Construct II on CRT, as | as measured by SD-OCT to |
| | measured by SD-OCT | Week 40 and Week 52 |
| | To assess the need for | Annualized supplemental |
| | supplemental anti-VEGF | anti-VEGF injection rate |
| | therapy in participants who | through Week 40 and Week 52 |
| | receive Construct II treatment | Proportion of participants who have |
| | | a reduction of ≥50% in the |
| | | annualized supplemental |
| | | anti-VEGF injection rate |
| | | through Week 40 and Week 52 |
| | | compared with the prior |
| | | 52 weeks preceding the first |
| | | intravitreal ranibizumab |
| | | injection received as part of the |
| | | Screening Period (Construct II |
| | | randomized participants) |
| | | Mean reduction in the annualized |
| | | supplemental anti-VEGF |
| | | injection rate through Week 40 |
| | | and Week 52 compared with |
| | | the prior 52 weeks preceding |
| | | the first ranibizumab injection |
| | | received as part of the |
| | | Screening Period (Construct II |
| | | randomized participants) |
| | | Time to first supplemental |
| | | anti-VEGF injection |
| Pharmacodynamics | To evaluate the concentration of | Mean change from baseline in |
| | Construct II TP in aqueous | aqueous Construct II TP |
| | humor | concentrations over time |
| Immunogenicity | To evaluate the immunogenicity | Immunogenicity measurements |
| | of Construct II | (AAV8: NAbs, TAbs, and |
| | | ELISpot; Construct II protein: |
| | | TAbs and ELISpot) |

Exploratory

| | | |
|---|---|---|
| Efficacy | To evaluate the effect of | Proportion of participants with no |
| | Construct II on fluid | fluid on SD-OCT |
| | accumulation as assessed by | Proportion of participants with |
| | SD-OCT | stable fluid on SD-OCT within |
| | | 30 μm of baseline |
| Safety | To assess changes in visual | Changes in visual field testing over |
| | function by visual fields | time |
| | To evaluate the incidences of new | Incidence of new area of |
| | areas of geographic atrophy, | geographic atrophy by FAF (in |
| | as assessed by FAF | participants with no geographic |
| | | atrophy at baseline) |
| Biomarker | To assess aqueous humor VEGF | VEGF-A concentrations (aqueous) |
| | concentrations | at assessed time points |

AAV8 = adeno-associated virus serotype 8;
AE = adverse event;
BCVA = best-corrected visual acuity;
CNV = choroidal neovascularization;
CRT = central retinal thickness;
ELISpot = enzyme-linked ImmunoSpot;
ETDRS = Early Treatment Diabetic Retinopathy Study;
FA = fluorescein angiography;
FAF = fundus autofluorescence;
NAbs = neutralizing antibodies;
SAE = serious adverse event;
SCS = suprachoroidal space;
SD-OCT = spectral domain-optical coherence tomography;
TAbs = total binding antibodies;
TP = transgene product;
VEGF = vascular endothelial growth factor

### (b) Study Design

[1117] In this phase 2, randomized (3:1), dose-escalation, ranibizumab-controlled, study, approximately 40 participants with nAMD will be enrolled into 2 dose cohorts. Within each dose cohort, participants will receive a one-time administration of Construct II in the SCS (n=15 participants) or an intravitreal injection of ranibizumab 0.5 mg every 4 weeks up to Week 52 (n=5 participants).

[1118] Participants who receive Construct II will strongly be encouraged to enroll in a long-term follow-up study after completion of the current study at Week 52 (or early discontinuation) and will sign a separate informed consent for the follow-up study at that time. Participants in the ranibizumab control arm will be offered an opportunity following the Week 52 visit to be included in a future Construct II dose cohort.

[1119] Screening will comprise 3 visits to select for eligible participants with qualifying AAV8 neutralizing antibodies (NAbs) titers (Visit 1) who demonstrate anatomic responsiveness to ranibizumab during a ranibizumab run-in phase (Visits 2 and 3). During Visit 1, participants who sign the informed consent form (ICF) will be evaluated for eligibility and will have serum samples collected to screen for pre-existing NAbs or will confirm NAb status from a NAb screening protocol. Participants who have negative or low (≤300) titer results for serum AAV8 NAbs will return to the study center to confirm the remaining inclusion/exclusion criteria. Participants continuing to meet eligibility criteria will receive a 0.5-mg intravitreal injection of ranibizumab in the study eye at Visit 2 (Day 1). At Visit 3 (Week 1), participants will be evaluated by spectral domain-optical coherence tomography (SD-OCT) to confirm their anatomic response to the screening anti-VEGF injection via comparison against their Day 1 SD-OCT assessment taken prior to the screening ranibizumab injection. Anatomic response will be determined by a central reading center (CRC) according to pre-specified criteria. Once the CRC has verified anatomic eligibility, 2 sentinel participants in each cohort will be randomized one to Construct II or ranibizumab control. Participants who do not have an anatomic response will be considered screen failures. For screen-failed participants, anyone who has an AE associated with the ranibizumab injections on Day 1 will be followed until the AE resolves (up to 30 days post injection).

[1120] At the Week 2 visit, Construct II randomized participants will receive either 1 or 2 injections of Construct II, depending on dose level, administered at the study center by SCS delivery using the Clearside SCS Microinjector™ investigational device; note that the Treatment Period of the study begins at the time of Construct II administration. All investigators will be trained on the SCS procedure. A detailed description of the procedure can be found in the SCS Administration Manual. Following Construct II administration to the sentinel participant who is randomized to Construct II, a 2-week observation period will be conducted for safety. The Sponsor's Internal Safety Committee (ISC) will review the safety data for this participant and, if there are no safety concerns, up to 18 additional participants (14 Construct II and 4 ranibizumab controls) may be randomized. If no safety review triggers (SRTs) are observed, then, following a 2-week observation period for the last dosed participant within the cohort, all available safety data will be evaluated by the Independent Data Monitoring Committee (IDMC). Additionally, if any event meets the criteria of a Stopping Rule, dosing of any new participants will be suspended until a complete review of all safety data has been performed. At any given IDMC meeting, whether planned or called for due to an SRT, the IDMC may recommend stopping the study, proceeding to the next dosing cohort, or proceeding to a lower dose (up to a half-log).

[1121] Participants randomized to Construct II will have 2 visits for post injection safety (1-day post procedure and 1-week post procedure). Starting 2 weeks after Construct II administration, participants will have monthly study visits and may receive intravitreal ranibizumab supplemental therapy if they meet predefined supplemental injection criteria. For participants in the Construct II treatment arms, immunogenicity to the vector (as assessed by AAV8 NAbs, AAV8 TAbs, antibodies to Construct II protein, and enzyme-linked ImmunoSpot [ELISpot]), VEGF-A concentrations, and anti-Construct II antibodies will be assessed throughout the study.

[1122] Participants randomized to the ranibizumab control arm will have their first post randomization visit at Week 4 and will receive intravitreal ranibizumab 0.5 mg. Following the Week 4 visit, the participants will have monthly (˜every 28 days) study visits during which they will receive an intravitreal injection of ranibizumab 0.5 mg.

[1123] Efficacy will be the primary focus of the initial 40 weeks (primary study period). Following completion of the primary study period, participants will continue to be assessed until Week 52. At the end of the Week 52 study visit, participants who received Construct II will be invited to enroll into a long-term follow-up study, while participants who were in the ranibizumab control arm, if eligible, will be offered an opportunity to be included in a future Construct II dose cohort. Participants will be evaluated for safety through the assessment of AEs, including SAEs and adverse events of special interest (AESIs) (ocular inflammation deemed by the investigator to be unrelated to the surgical/study procedure and graded as 2+ or greater on the ocular inflammation grading scales, ocular infections [including endophthalmitis], retinal tears or detachment, retinal thinning, and new arterial thromboembolic events [nonfatal stroke, nonfatal myocardial infarction, or vascular death (including deaths of unknown cause)]), as well as assessments of clinical laboratory tests (chemistry, hematology, coagulation, urinalysis), and ocular examinations and imaging (BCVA, IOP, slit-lamp biomicroscopy, indirect ophthalmoscopy, fluorescein angiography [FA], ultra-wide field Optos fundus auto fluorescence [FAF], ultra-wide field Optos color fundus photography [CFP], Humphrey visual field 120, or microperimetry, and SD-OCT). Note that AEs will be collected at all study visits. Participants who show evidence of new retinal hypo/hyper pigmentation changes as compared with baseline will be monitored using SD-OCT scans. Radial SD-OCT scans that transverse the margin of the hypo/hyper pigmentary area will be captured when possible.

[1124] Planned safety monitoring of the study participants will be conducted on an ongoing basis. The monitoring will include reviews conducted by the Medical Monitor and routine reviews conducted by the Sponsor's ISC. Separately, an IDMC will also be established and will meet on a periodic basis to independently review the clinical data.

[1125] 8.18.2 Inclusion Criteria

[1126] All Participants Entering the Study

[1127] Participants are eligible to be included in the study only if all of the following criteria apply:
[1128] 1. Males or females, aged ≥50 years and ≤89 years.
[1129] 2. Must have a diagnosis of subfoveal CNV secondary to AMD in the study eye, along with retinal fluid (either subretinal or intraretinal) within the parafovea (3-mm center of the macula, based on the early treatment diabetic retinopathy grid), as assessed by the CRC.
   [1130] CNV lesion characteristics: lesion size needs to be less than 10-disc areas (typical disc area=2.54 mm2).
[1131] 3. May be phakic or pseudophakic.
[1132] 4. Must have a negative or low serum titer result (≤300) for AAV8 NAbs.
[1133] 5. BCVA between ≤20/25 and ≥20/125 (≤83 and ≥44 Early Treatment Diabetic Retinopathy Study [ETDRS] letters) in the study eye.
[1134] 6. Based on the SD-OCT image obtained at Week 1, participants must have improvement in fluid (see Response Criterion below) and have a central retinal thickness (CRT) <400 μm. Note that, if the participant has disease other than fluid contributing to an increase (ie, PED or SHRM) in CRT, they will be enrolled if they have <75 μm of total fluid (intraretinal or subretinal), as determined by the CRC.
   [1135] Response Criterion: Participants must have an improvement in inner retinal (parafovea 3 mm) fluid relative to Visit 2 of >50 μm or 50%; or an improvement in center subfield thickness of >50 μm or 50%, as determined by the CRC.
[1136] 7. If both eyes are eligible, the study eye must be the participant's worse-seeing eye, as determined by the investigator.
[1137] 8. Women must be postmenopausal (defined as being at least 12 consecutive months without menses) or surgically sterilized (i.e., having a bilateral tubal ligation/bilateral salpingectomy, bilateral tubal occlusive procedure, hysterectomy, or bilateral oophorectomy). If not, women must have negative serum and urine pregnancy tests at Day 1 and be willing to undergo additional pregnancy testing during the study.
[1138] 9. Women of childbearing potential (WOCBP) (and their male partners) must be willing to use a highly effective method of contraception (Section 8.5) and male participants engaged in a sexual relationship with a WOCBP must be willing to use condoms from Week 2 until 24 weeks after Construct II administration.
[1139] 10. Must be willing and able to provide signed informed consent, comply with all study procedures, and be available for the duration of the study.

[1140] 8.18.3 Exclusion Criteria

[1141] Participants are excluded from the study if any of the following criteria apply:
[1142] 1. CNV or macular edema in the study eye secondary to any causes other than AMD.
[1143] 2. Subfoveal fibrosis or atrophy, as determined by the CRC.
[1144] 3. Participants who required >10 anti-VEGF injections in the 12 months prior to Visit 2.
[1145] 4. Participants who had a prior vitrectomy.
[1146] 5. Any condition in the investigator's opinion that could limit VA improvement in the study eye.
[1147] 6. Active or history of retinal detachment in the study eye.
[1148] 7. Advanced glaucoma in the study eye, defined as IOP of >23 mmHg not controlled by 2 IOP-lowering medications or any invasive procedure to treat glaucoma (eg, shunt, tube, or MIGS devices; however, selective laser trabeculectomy and argon laser trabeculoplasty are permitted).
[1149] 8. Any condition in the study eye that, in the opinion of the investigator, may increase the risk to the participant, require either medical or surgical intervention during the course of the study to prevent or treat vision loss, or interfere with study procedures or assessments.
[1150] 9. History of intravitreal therapy in the study eye, such as intravitreal steroid injection or investigational product, other than anti-VEGF therapy, in the 6 months prior to Visit 2.
[1151] 10. Presence of an implant in the study eye at screening (excluding an intraocular lens).
[1152] 11. History of malignancy requiring chemotherapy and/or radiation in the 5 years prior to screening. Localized basal cell carcinoma will be permitted.
[1153] 12. Received any gene therapy.
[1154] 13. History of therapy known to have caused retinal toxicity, or concomitant therapy with any drug that may affect VA or with known retinal toxicity, e.g., chloroquine or hydroxychloroquine.
[1155] 14. Any concomitant treatment that, in the opinion of the investigator, may interfere with the ocular procedure or healing process.
[1156] 15. Known hypersensitivity to ranibizumab or any of its components or past hypersensitivity (in the investigator's opinion) to agents like Construct II.
[1157] 16. Has a serious, chronic, or unstable medical or psychological condition that, in the opinion of the investigator, may compromise the participant's safety or ability to complete all assessments and follow-up in the study.
[1158] 17. Any condition preventing visualization of the fundus or VA improvement in the study eye, e.g., cataract, vitreous opacity, fibrosis, atrophy, or retinal epithelial tear in the center of the fovea.
[1159] 18. History of intraocular surgery in the study eye within 12 weeks prior to Visit 2. Yttrium aluminum garnet capsulotomy is permitted if performed >10 weeks prior to Visit 2.
[1160] 19. Receipt of any investigational product within 30 days of Visit 2 or 5 half-lives of the investigational product, whichever is longer.
[1161] 20. Ocular or periocular infection in the study eye that may interfere with the administration of Construct II.
[1162] 21. Myocardial infarction, cerebrovascular accident, or transient ischemic attacks within the 6 months prior to Visit 2.
[1163] 22. Uncontrolled hypertension (systolic blood pressure [BP] >180 mmHg, diastolic BP >100 mmHg) despite maximal medical treatment.
[1164] 23. Any participant with the following laboratory values collected at Visit 2 and confirmed at Visit 3:
   [1165] Aspartate aminotransferase (AST)/alanine aminotransferase (ALT) >2.5×upper limit of normal (ULN).
   [1166] Total bilirubin >1.5×ULN, unless the participant has a previously known history of Gilbert's syndrome and a fractionated bilirubin that shows conjugated bilirubin <35% of total bilirubin.
   [1167] Prothrombin time >1.5×ULN, unless the participant is anticoagulated.
   [1168] Hemoglobin <10 g/dL for male participants and <9 g/dL for female participants.
   [1169] Platelets <100×10³/μL.
   [1170] Estimated glomerular filtration rate <30 mL/min/1.73 m².

[1171] 8.18.4 Study Intervention(s) Administered

[1172] Eligible participants will be assigned either to receive Construct II (Dose 1 or Dose 2) or ranibizumab in the study eye. Information regarding Construct II and ranibizumab follows.

TABLE 8
Information regarding Construct II and ranibizumab

| | Arm Name | | |
|---|---|---|---|
| | Construct II Dose 1 | Construct II Dose 2 | Ranibizumab (LUCENTIS) |
| Type | Gene therapy (AAV8.CB7.CI.amd42.RBG) | | Drug (control treatment arm |
| | | | and run-in/rescue) |
| Dose | Solution | | |
| Formulation | | | |
| Unit Dose | 1.0 × 10¹² GC/mL | 2.5 × 10¹² GC/mL | 10 mg/mL |
| Strength | | | |
| Dose Level(s) | 100 μL | 100 μL | 0.5 mg (0.05 mL of |
| | (2.5 × 10¹¹ GC/eye) | (5.0 × 10¹¹ GC/eye) | 10 mg/mL solution) once at |
| | delivered via a single | delivered via 2 SCS | Visit 2 or as rescue starting 2 |
| | SCS injection | injections at the | weeks post Construct II |
| | | same visit | administration, provided |
| | | | according to rescue criteria |

| | | |
|---|---|---|
| Route of | Suprachoroidal space injection(s) in the study eye using the | Intravitreal injection in the |
| Administration | Clearside SCS Microinjector ™ investigational device | study eye |
| Physical | Construct II investigational product is supplied as a frozen, | LUCENTIS is supplied as a |
| Description | sterile, single-use solution of the AAV vector active | preservative-free, sterile |
| | ingredient (AAV8.CB7.CI.amd42.RBG) in a formulation | solution in a single-use |
| | buffer. The solution appears clear to opalescent, colorless, | container designed to deliver |
| | and free of visible particulates at room temperature. | 0.05 mL of 10 mg/mL |
| | | LUCENTIS (0.5-mg dose |
| | | prefilled syringe or vial) |
| | | aqueous solution. The |
| | | solution appears colorless to |
| | | pale yellow. |
| Manufacturer | Advanced BioScience Laboratories, Inc | Genentech, Inc |
| Packaging and | Construct II will be supplied as a sterile, single-use solution | Study intervention will be |
| Labeling | in 2-mL Crystal Zenith ® vials sealed with latex-free robber | obtained in commercial |
| | stoppers and aluminum flip-off seals. Each vial will be | packaging, either the |
| | labeled as required per country regulatory requirements. | prefilled syringe (NDC |
| | | 50242-080-03) or single-use |
| | | 2-mL glass vial (NDC |
| | | 50242-080-02) designed to |
| | | deliver 0.05 mL of |
| | | 10 mg/mL ranibizumab |
| | | solution. |

### 8.19 Example 19: Treatment of Batten-CLN2-Associated Vision Loss with Tripeptidyl-Peptidase 1 (TPP1) cDNA-Based Vector in Non-Human Primates

[1173] A nonclinical toxicology study in non-human primates was initiated to evaluate Tripeptidyl-Peptidase 1 (TPP1) cDNA-based vector by two different routes of administration—subretinal and suprachoroidal. All animals were sacrificed and tissues are being analyzed

[1174] In this study, groups of cynomolgus monkeys (5 animals/group) were administered TPP1 cDNA-based vector via subretinal (SR) injection at doses of 0 (vehicle), 1×10¹⁰, 1×10¹¹, 1×10¹² or 1×10¹³ GC/eye (100 μL). Additional groups (5 animals/group) were administered TPP1 cDNA-based vector via injection into the suprachoroidal space (SCS) using a microneedle at a dose of 0 (vehicle) or 1×10¹² GC/eye (two 50 μL injections at superior temporal or inferior nasal quadrants). All treated groups were administered TPP1 cDNA-based vector in both eyes. Control animals received an injection of vehicle into via either the SCS (OS) or the SR route (OD). Animals were euthanized either 4 weeks (2 animals/group) or 3 months (3 animals/group) after administration of the TPP1 cDNA-based vector. Endpoints included in this study were: clinical observations, body weights, ophthalmic procedures (ophthalmoscopy, intraocular pressure, optical coherence tomography, fundus ocular photography and full field electroretinography), TPP1 (aqueous and vitreous [terminal only] humor; serum), anti-AAV antibodies (nAbs), anti-transgene product antibodies (ATPA), biodistribution, organ weights, immunohistochemistry (anti-TPP1 in the eye), macroscopic and microscopic examination.

### 8.20 Example 20: Treatment of Batten-CLN2-Associated Vision Loss with Tripeptidyl-Peptidase 1 (TPP1) cDNA-Based Vector in Human Subject

[1175] A subject presenting with Batten-CLN2-associated vision loss is administered AAV9 that encodes Tripeptidyl-Peptidase 1 at a dose (e.g., 1×10¹⁰ to 5×10¹¹ genome copies per eye) sufficient to produce a therapeutically effective concentration of the transgene product in the vitreous humour for three months. The administration is done by a dual route of administration that involves both a central nervous system (CNS) delivery (e.g., intracerebroventricular (ICV), intracisternal (IC), or intrathecal-lumbar (IT-L) delivery) and an ocular delivery (e.g., suprachoroidal, subretinal, juxtascleral, or intravitreal delivery). Following treatment, the subject is evaluated for improvement in Batten-CLN2-associated vision loss.

### 8.21 Example 21: Use of an Infrared Thermal Camera to Monitor Injection in Pigs

[1176] The FLIR T530 infrared thermal camera was used to characterize post ocular injection thermal profiles in live pigs. Alternatively, an FLIR T420, FLIR T440, Fluke Ti400, or FLIRE60 infrared thermal camera is used. Suprachoroidal (FIG. 6), unsuccessful suprachoroidal, intravitreal, and extraocular efflux injections of room temperature saline (68-72° F.). were assessed in the study. Dose volume was 100 μL for every injection with the solution from the refrigerator to room temperature for injection.

[1177] Infrared camera lens to ocular surface distance was established at approximately 1 ft. The manual temperature range on the camera for viewing was set to ˜80-90° F. Imaging operator held the camera and set the center screen cursor aimed at the injection site during video recordings. Pigs received a retrobulbar injection of saline to proptose the eye for better visibility, and eye lids were cut and retracted back to expose the sclera at the site of injection. The iron filter was used during thermal video recordings.

[1178] A successful suprachoroidal injection was characterized by: (a) a slow, wide radial spread of the dark color, (b) very dark color at the beginning, and (c) a gradual change of injectate to lighter color, i.e., a temperature gradient noted by a lighter color. An unsuccessful suprachoroidal injection was characterized by: (a) no spread of the dark color, and (b) a minor change in color localized to the injection site. A successful intravitreal injection was characterized by: (a) no spread of the dark color, (b) an initial change to very dark color localized to the injection site, and (c) a gradual and uniform change of the entire eye to darker color occurring after the injection developing with time. Extraocular efflux was characterized by: (a) quick flowing streams on outside exterior of the eye, (b) very dark color at the beginning, and (c) a quick change to lighter color.

### 8.22 Example 22: Use of an Infrared Thermal Camera to Monitor Injection in Human Patients

[1179] A subject presenting with wet AMD is administered AAV8 that encodes ranibizumab Fab (e.g., by subretinal administration, suprachoroidal administration, or intravitreal administration) at a dose sufficient to produce a concentration of the transgene product at a Cmin of at least 0.330 μg/mL in the Vitreous humour for three months. The FLIR T530 infrared thermal camera is used to evaluate the injection during the procedure and is available to evaluate after the injection to confirm either that the administration is successfully completed or misdose of the administration. Alternatively, an FLIR T420, FLIR T440, Fluke Ti400, or FLIRE60 infrared thermal camera is used. Following treatment, the subject is evaluated clinically for signs of clinical effect and improvement in signs and symptoms of wet AMD.

### 8.23 Example 23: Treatment of Batten-CLN2-Associated Vision Loss with Tripeptidyl-Peptidase 1 (TPP1) cDNA-Based Vector in Human Subject by Suprachoroidal Administration

[1180] A subject presenting with Batten-CLN2-associated vision loss is administered AAV9 that encodes Tripeptidyl-Peptidase 1 at a dose (e.g., 1×10¹⁰ to 5×10¹¹ genome copies per eye) sufficient to produce a therapeutically effective concentration of the transgene product in the vitreous humour for three months. The TPP1 cDNA-based vector is administered by suprachoroidal administration. Following treatment, the subject is evaluated for improvement in Batten-CLN2-associated vision loss.

### 8.24 Example 24: Treatment of Batten-CLN2-Associated Vision Loss with Tripeptidyl-Peptidase 1 (TPP1) cDNA-Based Vector in Human Subject by Subretinal Administration

[1181] A subject presenting with Batten-CLN2-associated vision loss is administered AAV9 that encodes Tripeptidyl-Peptidase 1 at a dose (e.g., 1×10¹⁰ to 5×10¹¹ genome copies per eye) sufficient to produce a therapeutically effective concentration of the transgene product in the vitreous humour for three months. The TPP1 cDNA-based vector is administered by subretinal administration. Following treatment, the subject is evaluated for improvement in Batten-CLN2-associated vision loss.

### EQUIVALENTS

[1182] Although the invention is described in detail with reference to specific embodiments thereof, it will be understood that variations which are functionally equivalent are within the scope of this invention. Indeed, various modifications of the invention in addition to those shown and described herein will become apparent to those skilled in the art from the foregoing description and accompanying drawings. Such modifications are intended to fall within the scope of the appended claims. Those skilled in the art will recognize, or be able to ascertain using no more than routine experimentation, many equivalents to the specific embodiments of the invention described herein. Such equivalents are intended to be encompassed by the following claims.

[1183] All publications, patents and patent applications mentioned in this specification are herein incorporated by reference into the specification to the same extent as if each individual publication, patent or patent application was specifically and individually indicated to be incorporated herein by reference in their entireties.

The application's sequence listing, which the Patent Office published only in electronic form, follows.

SEQUENCE LISTING (321 sequences)

SEQ ID NO: 1 - protein, 214 aa, Artificial Sequence
  Ranibizumab Fab Amino Acid Sequence - light chain
DIQLTQSPSSLSASVGDRVTITCSASQDISNYLNWYQQKPGKAPKVLIYFTSSLHSGVPSRFSGSGSGTDFTLTISSLQPEDFATYYCQQYSTVPWTFGQGTKVEIKRTVAAPSVFIFPPSDEQLKSGTASVVCLLNNFYPREAKVQWKVDNALQSGNSQESVTEQDSKDSTYSLSSTLTLSKADYEKHKVYACEVTHQGLSSPVTKSFNRGEC

SEQ ID NO: 2 - protein, 231 aa, Artificial Sequence
  Ranibizumab Fab Amino Acid Sequence - heavy chain
EVQLVESGGGLVQPGGSLRLSCAASGYDFTHYGMNWVRQAPGKGLEWVGWINTYTGEPTYAADFKRRFTFSLDTSKSTAYLQMNSLRAEDTAVYYCAKYPYYYGTSHWYFDVWGQGTLVTVSSASTKGPSVFPLAPSSKSTSGGTAALGCLVKDYFPEPVTVSWNSGALTSGVHTFPAVLQSSGLYSLSSVVTVPSSSLGTQTYICNVNHKPSNTKVDKKVEPKSCDKTHL

SEQ ID NO: 3 - protein, 214 aa, Artificial Sequence
  Bevacizumab Fab Amino Acid Sequence - Light chain
DIQMTQSPSSLSASVGDRVTITCSASQDISNYLNWYQQKPGKAPKVLIYFTSSLHSGVPSRFSGSGSGTDFTLTISSLQPEDFATYYCQQYSTVPWTFGQGTKVEIKRTVAAPSVFIFPPSDEQLKSGTASVVCLLNNFYPREAKVQWKVDNALQSGNSQESVTEQDSKDSTYSLSSTLTLSKADYEKHKVYACEVTHQGLSSPVTKSFNRGEC

SEQ ID NO: 4 - protein, 231 aa, Artificial Sequence
  Bevacizumab Fab Amino Acid Sequence - Heavy chain
EVQLVESGGGLVQPGGSLRLSCAASGYTFTNYGMNWVRQAPGKGLEWVGWINTYTGEPTYAADFKRRFTFSLDTSKSTAYLQMNSLRAEDTAVYYCAKYPHYYGSSHWYFDVWGQGTLVTVSSASTKGPSVFPLAPSSKSTSGGTAALGCLVKDYFPEPVTVSWNSGALTSGVHTFPAVLQSSGLYSLSSVVTVPSSSLGTQTYICNVNHKPSNTKVDKKVEPKSCDKTHL

SEQ ID NO: 5 - protein, 26 aa, Artificial Sequence
  VEGF-A signal peptide
MNFLLSWVHWSLALLLYLHHAKWSQA

SEQ ID NO: 6 - protein, 29 aa, Artificial Sequence
  Fibulin-1 signal peptide
MERAAPSRRVPLPLLLLGGLALLAAGVDA

SEQ ID NO: 7 - protein, 19 aa, Artificial Sequence
  Vitronectin signal peptide
MAPLRPLLILALLAWVALA

SEQ ID NO: 8 - protein, 18 aa, Artificial Sequence
  Complement Factor H signal peptide
MRLLAKIICLMLWAICVA

SEQ ID NO: 9 - protein, 19 aa, Artificial Sequence
  Opticin signal peptide
MRLLAFLSLLALVLQETGT

SEQ ID NO: 10 - DNA, 728 bp, Artificial Sequence
  Bevacizumab cDNA - Light chain
gctagcgccaccatgggctggtcctgcatcatcctgttcctggtggccaccgccaccggcgtgcactccgacatccagatgacccagtccccctcctccctgtccgcctccgtgggcgaccgggtgaccatcacctgctccgcctcccaggacatctccaactacctgaactggtaccagcagaagcccggcaaggcccccaaggtgctgatctacttcacctcctccctgcactccggcgtgccctcccggttctccggctccggctccggcaccgacttcaccctgaccatctcctccctgcagcccgaggacttcgccacctactactgccagcagtactccaccgtgccctggaccttcggccagggcaccaaggtggagatcaagcggaccgtggccgccccctccgtgttcatcttccccccctccgacgagcagctgaagtccggcaccgcctccgtggtgtgcctgctgaacaacttctacccccgggaggccaaggtgcagtggaaggtggacaacgccctgcagtccggcaactcccaggagtccgtgaccgagcaggactccaaggactccacctactccctgtcctccaccctgaccctgtccaaggccgactacgagaagcacaaggtgtacgcctgcgaggtgacccaccagggcctgtcctcccccgtgaccaagtccttcaaccggggcgagtgctgagcggccgcctcgag

SEQ ID NO: 11 - DNA, 1440 bp, Artificial Sequence
  Bevacizumab cDNA - heavy chain
gctagcgccaccatgggctggtcctgcatcatcctgttcctggtggccaccgccaccggcgtgcactccgaggtgcagctggtggagtccggcggcggcctggtgcagcccggcggctccctgcggctgtcctgcgccgcctccggctacaccttcaccaactacggcatgaactgggtgcggcaggcccccggcaagggcctggagtgggtgggctggatcaacacctacaccggcgagcccacctacgccgccgacttcaagcggcggttcaccttctccctggacacctccaagtccaccgcctacctgcagatgaactccctgcgggccgaggacaccgccgtgtactactgcgccaagtacccccactactacggctcctcccactggtacttcgacgtgtggggccagggcaccctggtgaccgtgtcctccgcctccaccaagggcccctccgtgttccccctggccccctcctccaagtccacctccggcggcaccgccgccctgggctgcctggtgaaggactacttccccgagcccgtgaccgtgtcctggaactccggcgccctgacctccggcgtgcacaccttccccgccgtgctgcagtcctccggcctgtactccctgtcctccgtggtgaccgtgccctcctcctccctgggcacccagacctacatctgcaacgtgaaccacaagccctccaacaccaaggtggacaagaaggtggagcccaagtcctgcgacaagacccacacctgccccccctgccccgcccccgagctgctgggcggcccctccgtgttcctgttcccccccaagcccaaggacaccctgatgatctcccggacccccgaggtgacctgcgtggtggtggacgtgtcccacgaggaccccgaggtgaagttcaactggtacgtggacggcgtggaggtgcacaacgccaagaccaagccccgggaggagcagtacaactccacctaccgggtggtgtccgtgctgaccgtgctgcaccaggactggctgaacggcaaggagtacaagtgcaaggtgtccaacaaggccctgcccgcccccatcgagaagaccatctccaaggccaagggccagccccgggagccccaggtgtacaccctgcccccctcccgggaggagatgaccaagaaccaggtgtccctgacctgcctggtgaagggcttctacccctccgacatcgccgtggagtgggagtccaacggccagcccgagaacaactacaagaccaccccccccgtgctggactccgacggctccttcttcctgtactccaagctgaccgtggacaagtcccggtggcagcagggcaacgtgttctcctgctccgtgatgcacgaggccctgcacaaccactacacccagaagtccctgtccctgtcccccggcaagtgagcggccgcc

SEQ ID NO: 12 - DNA, 733 bp, Artificial Sequence
  Ranibizumab cDNA (Light chain comprising a signal sequence)
gagctccatggagtttttcaaaaagacggcacttgccgcactggttatgggttttagtggtgcagcattggccgatatccagctgacccagagcccgagcagcctgagcgcaagcgttggtgatcgtgttaccattacctgtagcgcaagccaggatattagcaattatctgaattggtatcagcagaaaccgggtaaagcaccgaaagttctgatttattttaccagcagcctgcatagcggtgttccgagccgttttagcggtagcggtagtggcaccgattttaccctgaccattagcagcctgcagccggaagattttgcaacctattattgtcagcagtatagcaccgttccgtggacctttggtcagggcaccaaagttgaaattaaacgtaccgttgcagcaccgagcgtttttatttttccgcctagtgatgaacagctgaaaagcggcaccgcaagcgttgtttgtctgctgaataatttttatccgcgtgaagcaaaagtgcagtggaaagttgataatgcactgcagagcggtaatagccaagaaagcgttaccgaacaggatagcaaagatagcacctatagcctgagcagcaccctgaccctgagcaaagcagattatgaaaaacacaaagtgtatgcctgcgaagttacccatcagggtctgagcagtccggttaccaaaagttttaatcgtggcgaatgctaatagaagcttggtacc

SEQ ID NO: 13 - DNA, 779 bp, Artificial Sequence
  Ranibizumab cDNA (Heavy chain comprising a signal sequence)
gagctcatatgaaatacctgctgccgaccgctgctgctggtctgctgctcctcgctgcccagccggcgatggccgaagttcagctggttgaaagcggtggtggtctggttcagcctggtggtagcctgcgtctgagctgtgcagcaagcggttatgattttacccattatggtatgaattgggttcgtcaggcaccgggtaaaggtctggaatgggttggttggattaatacctataccggtgaaccgacctatgcagcagattttaaacgtcgttttacctttagcctggataccagcaaaagcaccgcatatctgcagatgaatagcctgcgtgcagaagataccgcagtttattattgtgccaaatatccgtattactatggcaccagccactggtatttcgatgtttggggtcagggcaccctggttaccgttagcagcgcaagcaccaaaggtccgagcgtttttccgctggcaccgagcagcaaaagtaccagcggtggcacagcagcactgggttgtctggttaaagattattttccggaaccggttaccgtgagctggaatagcggtgcactgaccagcggtgttcatacctttccggcagttctgcagagcagcggtctgtatagcctgagcagcgttgttaccgttccgagcagcagcctgggcacccagacctatatttgtaatgttaatcataaaccgagcaataccaaagtggataaaaaagttgagccgaaaagctgcgataaaacccatctgtaatagggtacc

SEQ ID NO: 14 - protein, 11 aa, Artificial Sequence
  Bevacizumab and Ranibizumab Light Chain CDR1
SASQDISNYLN

SEQ ID NO: 15 - protein, 7 aa, Artificial Sequence
  Bevacizumab and Ranibizumab Light Chain CDR2
FTSSLHS

SEQ ID NO: 16 - protein, 9 aa, Artificial Sequence
  Bevacizumab and Ranibizumab Light Chain CDR3
QQYSTVPWT

SEQ ID NO: 17 - protein, 10 aa, Artificial Sequence
  Bevacizumab Heavy Chain CDR1
GYTFTNYGMN

SEQ ID NO: 18 - protein, 17 aa, Artificial Sequence
  Bevacizumab Heavy Chain CDR2
WINTYTGEPTYAADFKR

SEQ ID NO: 19 - protein, 14 aa, Artificial Sequence
  Bevacizumab Heavy Chain CDR3
YPHYYGSSHWYFDV

SEQ ID NO: 20 - protein, 10 aa, Artificial Sequence
  Ranibizumab Heavy Chain CDR1
GYDFTHYGMN

SEQ ID NO: 21 - protein, 14 aa, Artificial Sequence
  Ranibizumab Heavy Chain CDR3
YPYYYGTSHWYFDV

SEQ ID NO: 22 - protein, 18 aa, Artificial Sequence
  Albumin signal peptide
MKWVTFISLLFLFSSAYS

SEQ ID NO: 23 - protein, 18 aa, Artificial Sequence
  Chymotrypsinogen signal peptide
MAFLWLLSCWALLGTTFG

SEQ ID NO: 24 - protein, 20 aa, Artificial Sequence
  Interleukin-2 signal peptide
MYRMQLLSCIALILALVTNS

SEQ ID NO: 25 - protein, 15 aa, Artificial Sequence
  Trypsinogen-2 signal peptide
MNLLLILTFVAAAVA

SEQ ID NO: 26 - protein, 19 aa, Artificial Sequence
  F2A site
LLNFDLLKLAGDVESNPGP

SEQ ID NO: 27 - protein, 21 aa, Artificial Sequence
  Linker T2A
GSGEGRGSLLTCGDVEENPGP

SEQ ID NO: 28 - protein, 22 aa, Artificial Sequence
  Linker P2A
GSGATNFSLLKQAGDVEENPGP

SEQ ID NO: 29 - protein, 23 aa, Artificial Sequence
  Linker E2A
GSGQCTNYALLKLAGDVESNPGP

SEQ ID NO: 30 - protein, 25 aa, Artificial Sequence
  Linker F2A
GSGVKQTLNFDLLKLAGDVESNPGP

SEQ ID NO: 31 - protein, 4 aa, Artificial Sequence
  Furin linker
RKRR

SEQ ID NO: 32 - protein, 4 aa, Artificial Sequence
  Furin linker
RRRR

SEQ ID NO: 33 - protein, 4 aa, Artificial Sequence
  Furin linker
RRKR

SEQ ID NO: 34 - protein, 4 aa, Artificial Sequence
  Furin linker
RKKR

SEQ ID NO: 35 - protein, 4 aa, Artificial Sequence
  Furin linker
  MISC_FEATURE (2)..(2): X = any amino acid
  MISC_FEATURE (3)..(3): X = Lys or Arg
RXXR

SEQ ID NO: 36 - protein, 4 aa, Artificial Sequence
  Furin linker
  MISC_FEATURE (2)..(2): X = any amino acid
RXKR

SEQ ID NO: 37 - protein, 4 aa, Artificial Sequence
  Furin linker
  MISC_FEATURE (2)..(2): X = any amino acid
RXRR

SEQ ID NO: 38 - protein, 215 aa, Artificial Sequence
  Ranibizumab Fab Amino Acid Sequence - light chain
MDIQLTQSPSSLSASVGDRVTITCSASQDISNYLNWYQQKPGKAPKVLIYFTSSLHSGVPSRFSGSGSGTDFTLTISSLQPEDFATYYCQQYSTVPWTFGQGTKVEIKRTVAAPSVFIFPPSDEQLKSGTASVVCLLNNFYPREAKVQWKVDNALQSGNSQESVTEQDSKDSTYSLSSTLTLSKADYEKHKVYACEVTHQGLSSPVTKSFNRGEC

SEQ ID NO: 39 - protein, 236 aa, Artificial Sequence
  Ranibizumab Fab Amino Acid Sequence - heavy chain
MEVQLVESGGGLVQPGGSLRLSCAASGYDFTHYGMNWVRQAPGKGLEWVGWINTYTGEPTYAADFKRRFTFSLDTSKSTAYLQMNSLRAEDTAVYYCAKYPYYYGTSHWYFDVWGQGTLVTVSSASTKGPSVFPLAPSSKSTSGGTAALGCLVKDYFPEPVTVSWNSGALTSGVHTFPAVLQSSGLYSLSSVVTVPSSSLGTQTYICNVNHKPSNTKVDKKVEPKSCDKTHLRKRR

SEQ ID NO: 40 - protein, 232 aa, Artificial Sequence
  Ranibizumab Fab Amino Acid Sequence - heavy chain
MEVQLVESGGGLVQPGGSLRLSCAASGYDFTHYGMNWVRQAPGKGLEWVGWINTYTGEPTYAADFKRRFTFSLDTSKSTAYLQMNSLRAEDTAVYYCAKYPYYYGTSHWYFDVWGQGTLVTVSSASTKGPSVFPLAPSSKSTSGGTAALGCLVKDYFPEPVTVSWNSGALTSGVHTFPAVLQSSGLYSLSSVVTVPSSSLGTQTYICNVNHKPSNTKVDKKVEPKSCDKTHL

SEQ ID NO: 41 - protein, 736 aa, Artificial Sequence
  AAV1
MAADGYLPDWLEDNLSEGIREWWDLKPGAPKPKANQQKQDDGRGLVLPGYKYLGPFNGLDKGEPVNAADAAALEHDKAYDQQLKAGDNPYLRYNHADAEFQERLQEDTSFGGNLGRAVFQAKKRVLEPLGLVEEGAKTAPGKKRPVEQSPQEPDSSSGIGKTGQQPAKKRLNFGQTGDSESVPDPQPLGEPPATPAAVGPTTMASGGGAPMADNNEGADGVGNASGNWHCDSTWLGDRVITTSTRTWALPTYNNHLYKQISSASTGASNDNHYFGYSTPWGYFDFNRFHCHFSPRDWQRLINNNWGFRPKRLNFKLFNIQVKEVTTNDGVTTIANNLTSTVQVFSDSEYQLPYVLGSAHQGCLPPFPADVFMIPQYGYLTLNNGSQAVGRSSFYCLEYFPSQMLRTGNNFTFSYTFEEVPFHSSYAHSQSLDRLMNPLIDQYLYYLNRTQNQSGSAQNKDLLFSRGSPAGMSVQPKNWLPGPCYRQQRVSKTKTDNNNSNFTWTGASKYNLNGRESIINPGTAMASHKDDEDKFFPMSGVMIFGKESAGASNTALDNVMITDEEEIKATNPVATERFGTVAVNFQSSSTDPATGDVHAMGALPGMVWQDRDVYLQGPIWAKIPHTDGHFHPSPLMGGFGLKNPPPQILIKNTPVPANPPAEFSATKFASFITQYSTGQVSVEIEWELQKENSKRWNPEVQYTSNYAKSANVDFTVDNNGLYTEPRPIGTRYLTRPL

SEQ ID NO: 42 - protein, 735 aa, Artificial Sequence [sequence omitted]

SEQ ID NO: 43 - protein, 736 aa, Artificial Sequence
  AAV3-3
MAADGYLPDWLEDNLSEGIREWWALKPGVPQPKANQQHQDNRRGLVLPGYKYLGPGNGLDKGEPVNEADAAALEHDKAYDQQLKAGDNPYLKYNHADAEFQERLQEDTSFGGNLGRAVFQAKKRILEPLGLVEEAAKTAPGKKGAVDQSPQEPDSSSGVGKSGKQPARKRLNFGQTGDSESVPDPQPLGEPPAAPTSLGSNTMASGGGAPMADNNEGADGVGNSSGNWHCDSQWLGDRVITTSTRTWALPTYNNHLYKQISSQSGASNDNHYFGYSTPWGYFDFNRFHCHFSPRDWQRLINNNWGFRPKKLSFKLFNIQVRGVTQNDGTTTIANNLTSTVQVFTDSEYQLPYVLGSAHQGCLPPFPADVFMVPQYGYLTLNNGSQAVGRSSFYCLEYFPSQMLRTGNNFQFSYTFEDVPFHSSYAHSQSLDRLMNPLIDQYLYYLNRTQGTTSGTTNQSRLLFSQAGPQSMSLQARNWLPGPCYRQQRLSKTANDNNNSNFPWTAASKYHLNGRDSLVNPGPAMASHKDDEEKFFPMHGNLIFGKEGTTASNAELDNVMITDEEEIRTTNPVATEQYGTVANNLQSSNTAPTTGTVNHQGALPGMVWQDRDVYLQGPIWAKIPHTDGHFHPSPLMGGFGLKHPPPQIMIKNTPVPANPPTTFSPAKFASFITQYSTGQVSVEIEWELQKENSKRWNPEIQYTSNYNKSVNVDFTVDTNGVYSEPRPIGTRYLTRNL

SEQ ID NO: 44 - protein, 734 aa, Artificial Sequence
  AAV4-4
MTDGYLPDWLEDNLSEGVREWWALQPGAPKPKANQQHQDNARGLVLPGYKYLGPGNGLDKGEPVNAADAAALEHDKAYDQQLKAGDNPYLKYNHADAEFQQRLQGDTSFGGNLGRAVFQAKKRVLEPLGLVEQAGETAPGKKRPLIESPQQPDSSTGIGKKGKQPAKKKLVFEDETGAGDGPPEGSTSGAMSDDSEMRAAAGGAAVEGGQGADGVGNASGDWHCDSTWSEGHVTTTSTRTWVLPTYNNHLYKRLGESLQSNTYNGFSTPWGYFDFNRFHCHFSPRDWQRLINNNWGMRPKAMRVKIFNIQVKEVTTSNGETTVANNLTSTVQIFADSSYELPYVMDAGQEGSLPPFPNDVFMVPQYGYCGLVTGNTSQQQTDRNAFYCLEYFPSQMLRTGNNFEITYSFEKVPFHSMYAHSQSLDRLMNPLIDQYLWGLQSTTTGTTLNAGTATTNFTKLRPTNFSNFKKNWLPGPSIKQQGFSKTANQNYKIPATGSDSLIKYETHSTLDGRWSALTPGPPMATAGPADSKFSNSQLIFAGPKQNGNTATVPGTLIFTSEEELAATNATDTDMWGNLPGGDQSNSNLPTVDRLTALGAVPGMVWQNRDIYYQGPIWAKIPHTDGHFHPSPLIGGFGLKHPPPQIFIKNTPVPANPATTFSSTPVNSFITQYSTGQVSVQIDWEIQKERSKRWNPEVQFTSNYGQQNSLLWAPDAAGKYTEPRAIGTRYLTHHL

SEQ ID NO: 45 - protein, 724 aa, Artificial Sequence
  AAV5
MSFVDHPPDWLEEVGEGLREFLGLEAGPPKPKPNQQHQDQARGLVLPGYNYLGPGNGLDRGEPVNRADEVAREHDISYNEQLEAGDNPYLKYNHADAEFQEKLADDTSFGGNLGKAVFQAKKRVLEPFGLVEEGAKTAPTGKRIDDHFPKRKKARTEEDSKPSTSSDAEAGPSGSQQLQIPAQPASSLGADTMSAGGGGPLGDNNQGADGVGNASGDWHCDSTWMGDRVVTKSTRTWVLPSYNNHQYREIKSGSVDGSNANAYFGYSTPWGYFDFNRFHSHWSPRDWQRLINNYWGFRPRSLRVKIFNIQVKEVTVQDSTTTIANNLTSTVQVFTDDDYQLPYVVGNGTEGCLPAFPPQVFTLPQYGYATLNRDNTENPTERSSFFCLEYFPSKMLRTGNNFEFTYNFEEVPFHSSFAPSQNLFKLANPLVDQYLYRFVSTNNTGGVQFNKNLAGRYANTYKNWFPGPMGRTQGWNLGSGVNRASVSAFATTNRMELEGASYQVPPQPNGMTNNLQGSNTYALENTMIFNSQPANPGTTATYLEGNMLITSESETQPVNRVAYNVGGQMATNNQSSTTAPATGTYNLQEIVPGSVWMERDVYLQGPIWAKIPETGAHFHPSPAMGGFGLKHPPPMMLIKNTPVPGNITSFSDVPVSSFITQYSTGQVTVEMEWELKKENSKRWNPEIQYTNNYNDPQFVDFAPDSTGEYRTTRPIGTRYLTRPL

SEQ ID NO: 46 - protein, 736 aa, Artificial Sequence
  AAV6
MAADGYLPDWLEDNLSEGIREWWDLKPGAPKPKANQQKQDDGRGLVLPGYKYLGPFNGLDKGEPVNAADAAALEHDKAYDQQLKAGDNPYLRYNHADAEFQERLQEDTSFGGNLGRAVFQAKKRVLEPFGLVEEGAKTAPGKKRPVEQSPQEPDSSSGIGKTGQQPAKKRLNFGQTGDSESVPDPQPLGEPPATPAAVGPTTMASGGGAPMADNNEGADGVGNASGNWHCDSTWLGDRVITTSTRTWALPTYNNHLYKQISSASTGASNDNHYFGYSTPWGYFDFNRFHCHFSPRDWQRLINNNWGFRPKRLNFKLFNIQVKEVTTNDGVTTIANNLTSTVQVFSDSEYQLPYVLGSAHQGCLPPFPADVFMIPQYGYLTLNNGSQAVGRSSFYCLEYFPSQMLRTGNNFTFSYTFEDVPFHSSYAHSQSLDRLMNPLIDQYLYYLNRTQNQSGSAQNKDLLFSRGSPAGMSVQPKNWLPGPCYRQQRVSKTKTDNNNSNFTWTGASKYNLNGRESIINPGTAMASHKDDKDKFFPMSGVMIFGKESAGASNTALDNVMITDEEEIKATNPVATERFGTVAVNLQSSSTDPATGDVHVMGALPGMVWQDRDVYLQGPIWAKIPHTDGHFHPSPLMGGFGLKHPPPQILIKNTPVPANPPAEFSATKFASFITQYSTGQVSVEIEWELQKENSKRWNPEVQYTSNYAKSANVDFTVDNNGLYTEPRPIGTRYLTRPL

SEQ ID NO: 47 - protein, 737 aa, Artificial Sequence
  AAV7
MAADGYLPDWLEDNLSEGIREWWDLKPGAPKPKANQQKQDNGRGLVLPGYKYLGPFNGLDKGEPVNAADAAALEHDKAYDQQLKAGDNPYLRYNHADAEFQERLQEDTSFGGNLGRAVFQAKKRVLEPLGLVEEGAKTAPAKKRPVEPSPQRSPDSSTGIGKKGQQPARKRLNFGQTGDSESVPDPQPLGEPPAAPSSVGSGTVAAGGGAPMADNNEGADGVGNASGNWHCDSTWLGDRVITTSTRTWALPTYNNHLYKQISSETAGSTNDNTYFGYSTPWGYFDFNRFHCHFSPRDWQRLINNNWGFRPKKLRFKLFNIQVKEVTTNDGVTTIANNLTSTIQVFSDSEYQLPYVLGSAHQGCLPPFPADVFMIPQYGYLTLNNGSQSVGRSSFYCLEYFPSQMLRTGNNFEFSYSFEDVPFHSSYAHSQSLDRLMNPLIDQYLYYLARTQSNPGGTAGNRELQFYQGGPSTMAEQAKNWLPGPCFRQQRVSKTLDQNNNSNFAWTGATKYHLNGRNSLVNPGVAMATHKDDEDRFFPSSGVLIFGKTGATNKTTLENVLMTNEEEIRPTNPVATEEYGIVSSNLQAANTAAQTQVVNNQGALPGMVWQNRDVYLQGPIWAKIPHTDGNFHPSPLMGGFGLKHPPPQILIKNTPVPANPPEVFTPAKFASFITQYSTGQVSVEIEWELQKENSKRWNPEIQYTSNFEKQTGVDFAVDSQGVYSEPRPIGTRYLTRNL

SEQ ID NO: 48 - protein, 738 aa, Artificial Sequence
  AAV8
MAADGYLPDWLEDNLSEGIREWWALKPGAPKPKANQQKQDDGRGLVLPGYKYLGPFNGLDKGEPVNAADAAALEHDKAYDQQLQAGDNPYLRYNHADAEFQERLQEDTSFGGNLGRAVFQAKKRVLEPLGLVEEGAKTAPGKKRPVEPSPQRSPDSSTGIGKKGQQPARKRLNFGQTGDSESVPDPQPLGEPPAAPSGVGPNTMAAGGGAPMADNNEGADGVGSSSGNWHCDSTWLGDRVITTSTRTWALPTYNNHLYKQISNGTSGGATNDNTYFGYSTPWGYFDFNRFHCHFSPRDWQRLINNNWGFRPKRLSFKLFNIQVKEVTQNEGTKTIANNLTSTIQVFTDSEYQLPYVLGSAHQGCLPPFPADVFMIPQYGYLTLNNGSQAVGRSSFYCLEYFPSQMLRTGNNFQFTYTFEDVPFHSSYAHSQSLDRLMNPLIDQYLYYLSRTQTTGGTANTQTLGFSQGGPNTMANQAKNWLPGPCYRQQRVSTTTGQNNNSNFAWTAGTKYHLNGRNSLANPGIAMATHKDDEERFFPSNGILIFGKQNAARDNADYSDVMLTSEEEIKTTNPVATEEYGIVADNLQQQNTAPQIGTVNSQGALPGMVWQNRDVYLQGPIWAKIPHTDGNFHPSPLMGGFGLKHPPPQILIKNTPVPADPPTTFNQSKLNSFITQYSTGQVSVEIEWELQKENSKRWNPEIQYTSNYYKSTSVDFAVNTEGVYSEPRPIGTRYLTRNL

SEQ ID NO: 49 - protein, 736 aa, Artificial Sequence
  hu31
MAADGYLPDWLEDTLSEGIRQWWKLKPGPPPPKPAERHKDDSRGLVLPGYKYLGPGNGLDKGEPVNAADAAALEHDKAYDQQLKAGDNPYLKYNHADAEFQERLKEDTSFGGNLGRAVFQAKKRLLEPLGLVEEAAKTAPGKKRPVEQSPQEPDSSAGIGKSGSQPAKKKLNFGQTGDTESVPDPQPIGEPPAAPSGVGSLTMASGGGAPVADNNEGADGVGSSSGNWHCDSQWLGDRVITTSTRTWALPTYNNHLYKQISNSTSGGSSNDNAYFGYSTPWGYFDFNRFHCHFSPRDWQRLINNNWGFRPKRLNFKLFNIQVKEVTDNNGVKTIANNLTSTVQVFTDSDYQLPYVLGSAHEGCLPPFPADVFMIPQYGYLTLNDGGQAVGRSSFYCLEYFPSQMLRTGNNFQFSYEFENVPFHSSYAHSQSLDRLMNPLIDQYLYYLSKTINGSGQNQQTLKFSVAGPSNMAVQGRNYIPGPSYRQQRVSTTVTQNNNSEFAWPGASSWALNGRNSLMNPGPAMASHKEGEDRFFPLSGSLIFGKQGTGRDNVDADKVMITNEEEIKTTNPVATESYGQVATNHQSAQAQAQTGWVQNQGILPGMVWQDRDVYLQGPIWAKIPHTDGNFHPSPLMGGFGMKHPPPQILIKNTPVPADPPTAFNKDKLNSFITQYSTGQVSVEIEWELQKENSKRWNPEIQYTSNYYKSNNVEFAVSTEGVYSEPRPIGTRYLTRNL

SEQ ID NO: 50 - protein, 736 aa, Artificial Sequence
  hu32
MAADGYLPDWLEDTLSEGIRQWWKLKPGPPPPKPAERHKDDSRGLVLPGYKYLGPGNGLDKGEPVNAADAAALEHDKAYDQQLKAGDNPYLKYNHADAEFQERLKEDTSFGGNLGRAVFQAKKRLLEPLGLVEEAAKTAPGKKRPVEQSPQEPDSSAGIGKSGSQPAKKKLNFGQTGDTESVPDPQPIGEPPAAPSGVGSLTMASGGGAPVADNNEGADGVGSSSGNWHCDSQWLGDRVITTSTRTWALPTYNNHLYKQISNSTSGGSSNDNAYFGYSTPWGYFDFNRFHCHFSPRDWQRLINNNWGFRPKRLNFKLFNIQVKEVTDNNGVKTIANNLTSTVQVFTDSDYQLPYVLGSAHEGCLPPFPADVFMIPQYGYLTLNDGSQAVGRSSFYCLEYFPSQMLRTGNNFQFSYEFENVPFHSSYAHSQSLDRLMNPLIDQYLYYLSKTINGSGQNQQTLKFSVAGPSNMAVQGRNYIPGPSYRQQRVSTTVTQNNNSEFAWPGASSWALNGRNSLMNPGPAMASHKEGEDRFFPLSGSLIFGKQGTGRDNVDADKVMITNEEEIKTTNPVATESYGQVATNHQSAQAQAQTGWVQNQGILPGMVWQDRDVYLQGPIWAKIPHTDGNFHPSPLMGGFGMKHPPPQILIKNTPVPADPPTAFNKDKLNSFITQYSTGQVSVEIEWELQKENSKRWNPEIQYTSNYYKSNNVEFAVNTEGVYSEPRPIGTRYLTRNL

SEQ ID NO: 51 - protein, 736 aa, Artificial Sequence
  AAV9
MAADGYLPDWLEDNLSEGIREWWALKPGAPQPKANQQHQDNARGLVLPGYKYLGPGNGLDKGEPVNAADAAALEHDKAYDQQLKAGDNPYLKYNHADAEFQERLKEDTSFGGNLGRAVFQAKKRLLEPLGLVEEAAKTAPGKKRPVEQSPQEPDSSAGIGKSGAQPAKKRLNFGQTGDTESVPDPQPIGEPPAAPSGVGSLTMASGGGAPVADNNEGADGVGSSSGNWHCDSQWLGDRVITTSTRTWALPTYNNHLYKQISNSTSGGSSNDNAYFGYSTPWGYFDFNRFHCHFSPRDWQRLINNNWGFRPKRLNFKLFNIQVKEVTDNNGVKTIANNLTSTVQVFTDSDYQLPYVLGSAHEGCLPPFPADVFMIPQYGYLTLNDGSQAVGRSSFYCLEYFPSQMLRTGNNFQFSYEFENVPFHSSYAHSQSLDRLMNPLIDQYLYYLSKTINGSGQNQQTLKFSVAGPSNMAVQGRNYIPGPSYRQQRVSTTVTQNNNSEFAWPGASSWALNGRNSLMNPGPAMASHKEGEDRFFPLSGSLIFGKQGTGRDNVDADKVMITNEEEIKTTNPVATESYGQVATNHQSAQAQAQTGWVQNQGILPGMVWQDRDVYLQGPIWAKIPHTDGNFHPSPLMGGFGMKHPPPQILIKNTPVPADPPTAFNKDKLNSFITQYSTGQVSVEIEWELQKENSKRWNPEIQYTSNYYKSNNVEFAVNTEGVYSEPRPIGTRYLTRNL

SEQ ID NO: 52 - protein, 567 aa, Homo sapiens
  SPERMATOGENESIS ASSOCIATED 7 (SPATA7) <Accession No.: AAH90875.1>
MDGSRRVRATSVLPRYGPPCLFKGHLSTKSNAAVDCSVPVSVSTSIKYADQQRREKLKKELAQCEKEFKLTKTAMRANYKNNSKSLFNTLQKPSGEPQIEDDMLKEEMNGFSSFARSLVPSSERLHLSLHKSSKVITNGPEKNSSSSPSSVDYAASGPRKLSSGALYGRRPRSTFPNSHRFQLVISKAPSGDLLDKHSELFSNKQLPFTPRTLKTEAKSFLSQYRYYTPAKRKKDFTDQRIEAETQTELSFKSELGTAETKNMTDSEMNIKQASNCVTYDAKEKIAPLPLEGHDSTWDEIKDDALQHSSPRAMCQYSLKPPSTRKIYSDEEELLYLSFIEDVTDEILKLGLFSNRFLERLFERHIKQNKHLEEEKMRHLLHVLKVDLGCTSEENSVKQNDVDMLNVFDFEKAGNSEPNELKNESEVTIQQERQQYQKALDMLLSAPKDENEIFPSPTEFFMPIYKSKHSEGVIIQQVNDETNLETSTLDENHPSISDSLTDRETSVNVIEGDSDPEKVEISNGLCGLNTSPSQSVQFSSVKGDNNHDMELSTLKIMEMSIEDCPLDV

SEQ ID NO: 53 - protein, 697 aa, Homo sapiens
  LEBERCILIN (LCA5) <Accession No.: NP_001116241.1>
MGERAGSPGTDQERKAGKHHYSYLSDFETPQSSGRSSLVSSSPASVRRKNPKRQTSDGQVHHQAPRKPSPKGLPNRKGVRVGFRSQSLNREPLRKDTDLVTKRILSARLLKINELQNEVSELQVKLAELLKENKSLKRLQYRQEKALNKFEDAENEISQLIFRHNNEITALKERLRKSQEKERATEKRVKDTESELFRTKFSLQKLKEISEARHLPERDDLAKKLVSAELKLDDTERRIKELSKNLELSTNSFQRQLLAERKRAYEAHDENKVLQKEVQRLYHKLKEKERELDIKNIYSNRLPKSSPNKEKELALRKNAACQSDFADLCTKGVQTMEDFKPEEYPLTPETIMCYENKWEEPGHLTLDLQSQKQDRHGEAGILNPIMEREEKFVTDEELHVVKQEVEKLEDEWEREELDKKQKEKASLLEREEKPEWETGRYQLGMYPIQNMDKLQGEEEERLKREMLLAKLNEIDRELQDSRNLKYPVLPLLPDFESKLHSPERSPKTYRFSESSERLFNGHHLQDISFSTPKGEGQNSGNVRSPASPNEFAFGSYVPSFAKTSERSNPFSQKSSFLDFQRNSMEKLSKDGVDLITRKEKKANLMEQLFGASGSSTISSKSSDPNSVASSKGDIDPLNFLPGNKGSRDQEHDEDEGFFLSEGRSFNPNRHRLKHADDKPAVKAADSVEDEIEEVALR

SEQ ID NO: 54 - protein, 1286 aa, Homo sapiens
  RPGR INTERACTING PROTEIN 1 (RPGRIP1) <Accession No.: CAD01135.1>
MSHLVDPTSGDLPVRDIDAIPLVLPASKGKNMKTQPPLSRMNREELEDSFFRLREDHMLVKELSWKQQDEIKRLRTTLLRLTAAGRDLRVAEEAAPLSETARRGQKAGWRQRLSMHQRPQMHRLQGHFHCVGPASPRRAQPRVQVGHRQLHTAGAPVPEKPKRGPRDRLSYTAPPSFKEHATNENRGEVASKPSELVSGSNSIISFSSVISMAKPIGLCMPNSAHIMASNTMQVEEPPKSPEKMWPKDENFEQRSSLECAQKAAELRASIKEKVELIRLKKLLHERNASLVMTKAQLTEVQEAYETLLQKNQGILSAAHEALLKQVNELRAELKEESKKAVSLKSQLEDVSILQMTLKEFQERVEDLEKERKLLNDNYDKLLESMLDSSDSSSQPHWSNELIAEQLQQQVSQLQDQLDAELEDKRKVLLELSREKAQNEDLKLEVTNILQKHKQEVELLQNAATISQPPDRQSEPATHPAVLQENTQIEPSEPKNQEEKKLSQVLNELQVSHAETTLELEKTRDMLILQRKINVCYQEELEAMMTKADNDNRDHKEKLERLTRLLDLKNNRIKQLEGILRSHDLPTSEQLKDVAYGTRPLSLCLETLPAHGDEDKVDISLLHQGENLFELHIHQAFLTSAALAQAGDTQPTTFCTYSFYDFETHCTPLSVGPQPLYDFTSQYVMETDSLFLHYLQEASARLDIHQAMASEHSTLAAGWICFDRVLETVEKVHGLATLIGAGGEEFGVLEYWMRLRFPIKPSLQACNKRKKAQVYLSTDVLGGRKAQEEEFRSESWEPQNELWIEITKCCGLRSRWLGTQPSPYAVYRFFTFSDHDTAIIPASNNPYFRDQARFPVLVTSDLDHYLRREALSIHVFDDEDLEPGSYLGRARVPLLPLAKNESIKGDFNLTDPAEKPNGSIQVQLDWKFPYIPPESFLKPEAQTKGKDTKDSSKISSEEEKASFPSQDQMASPEVPIEAGQYRSKRKPPHGGERKEKEHQVVSYSRRKHGKRIGVQGKNRMEYLSLNILNGNTPQQVNYTEWKFSETNSFIGDGFKNQHEEEEMTLSHSALKQKEPLHPVNDKESSEQGSEVSEAQTTDSDDVIVPPMSQKYPKADSEKMCIEIVSLAFYPEAEVMSDENIKQVYVEYKFYDLPLSETETPVSLRKPRAGEEIHFHFSKVIDLDPQEQQGRRRFLFDMLNGQDPDQGHLKFTVVSDPLDEEKKECEEVGYAYLQLWQILESGRDILEQELDIVSPEDLATPIGRLKVSLQAAAVLHAIYKEMTEDLFS

SEQ ID NO: 55 - protein, 299 aa, Homo sapiens [sequence omitted]

SEQ ID NO: 56 - protein, 1406 aa, Homo sapiens
  CRUMBS CELL POLARITY COMPLEX COMPONENT 1 (CRB1), HOMOLOG 1 ISOFORM 1 PRECURSOR <Accession No.: NP_957705.1>
MALKNINYLLIFYLSFSLLIYIKNSFCNKNNTRCLSNSCQNNSTCKDFSKDNDCSCSDTANNLDKDCDNMKDPCFSNPCQGSATCVNTPGERSFLCKCPPGYSGTICETTIGSCGKNSCQHGGICHQDPIYPVCICPAGYAGRFCEIDHDECASSPCQNGAVCQDGIDGYSCFCVPGYQGRHCDLEVDECASDPCKNEATCLNEIGRYTCICPHNYSGVNCELEIDECWSQPCLNGATCQDALGAYFCDCAPGFLGDHCELNTDECASQPCLHGGLCVDGENRYSCNCTGSGFTGTHCETLMPLCWSKPCHNNATCEDSVDNYTCHCWPGYTGAQCEIDLNECNSNPCQSNGECVELSSEKQYGRITGLPSSFSYHEASGYVCICQPGFTGIHCEEDVNECSSNPCQNGGTCENLPGNYTCHCPFDNLSRTFYGGRDCSDILLGCTHQQCLNNGTCIPHFQDGQHGFSCLCPSGYTGSLCEIATTLSFEGDGFLWVKSGSVTTKGSVCNIALRFQTVQPMALLLFRSNRDVFVKLELLSGYIHLSIQVNNQSKVLLFISHNTSDGEWHFVEVIFAEAVTLTLIDDSCKEKCIAKAPTPLESDQSICAFQNSFLGGLPVGMTSNGVALLNFYNMPSTPSFVGCLQDIKIDWNHITLENISSGSSLNVKAGCVRKDWCESQPCQSRGRCINLWLSYQCDCHRPYEGPNCLREYVAGRFGQDDSTGYVIFTLDESYGDTISLSMFVRTLQPSGLLLALENSTYQYIRVWLERGRLAMLTPNSPKLVVKFVLNDGNVHLISLKIKPYKIELYQSSQNLGFISASTWKIEKGDVIYIGGLPDKQETELNGGFFKGCIQDVRLNNQNLEFFPNPTNNASLNPVLVNVTQGCAGDNSCKSNPCHNGGVCHSRWDDFSCSCPALTSGKACEEVQWCGFSPCPHGAQCQPVLQGFECIANAVFNGQSGQILFRSNGNITRELTNITFGFRTRDANVIILHAEKEPEFLNISIQDSRLFFQLQSGNSFYMLSLTSLQSVNDGTWHEVTLSMTDPLSQTSRWQMEVDNETPFVTSTIATGSLNFLKDNTDIYVGDRAIDNIKGLQGCLSTIEIGGIYLSYFENVHGFINKPQEEQFLKISTNSVVTGCLQLNVCNSNPCLHGGNCEDIYSSYHCSCPLGWSGKHCELNIDECFSNPCIHGNCSDRVAAYHCTCEPGYTGVNCEVDIDNCQSHQCANGATCISHTNGYSCLCFGNFTGKFCRQSRLPSTVCGNEKTNLTCYNGGNCTEFQTELKCMCRPGFTGEWCEKDIDECASDPCVNGGLCQDLLNKFQCLCDVAFAGERCEVDLADDLISDIFTTIGSVTVALLLILLLAIVASVVTSNKRATQGTYSPSRQEKEGSRVEMWNLMPPPAMERLI

SEQ ID NO: 57 - protein, 1294 aa, Homo sapiens
  CRUMBS CELL POLARITY COMPLEX COMPONENT 1 (CRB1), HOMOLOG 1 ISOFORM 2 PRECURSOR <Accession No.: NP_001180569.1>
MALKNINYLLIFYLSFSLLIYIKNSFCNKNNTRCLSNSCQNNSTCKDFSKDNDCSCSDTANNLDKDCDNMKDPCFSNPCQGSATCVNTPGERSFLCKCPPGYSGTICETTIGSCGKNSCQHGGICHQDPIYPVCICPAGYAGRFCEIDHDECASSPCQNGAVCQDGIDGYSCFCVPGYQGRHCDLEVDECASDPCKNEATCLNEIGRYTCICPHNYSGYTGAQCEIDLNECNSNPCQSNGECVELSSEKQYGRITGLPSSFSYHEASGYVCICQPGFTGIHCEEDVNECSSNPCQNGGTCENLPGNYTCHCPFDNLSRTFYGGRDCSDILLGCTHQQCLNNGTCIPHFQDGQHGFSCLCPSGYTGSLCEIATTLSFEGDGFLWVKSGSVTTKGSVCNIALRFQTVQPMALLLFRSNRDVFVKLELLSGYIHLSIQVNNQSKVLLFISHNTSDGEWHFVEVIFAEAVTLTLIDDSCKEKCIAKAPTPLESDQSICAFQNSFLGGLPVGMTSNGVALLNFYNMPSTPSFVGCLQDIKIDWNHITLENISSGSSLNVKAGCVRKDWCESQPCQSRGRCINLWLSYQCDCHRPYEGPNCLREYVAGRFGQDDSTGYVIFTLDESYGDTISLSMFVRTLQPSGLLLALENSTYQYIRVWLERGRLAMLTPNSPKLVVKFVLNDGNVHLISLKIKPYKIELYQSSQNLGFISASTWKIEKGDVIYIGGLPDKQETELNGGFFKGCIQDVRLNNQNLEFFPNPTNNASLNPVLVNVTQGCAGDNSCKSNPCHNGGVCHSRWDDFSCSCPALTSGKACEEVQWCGFSPCPHGAQCQPVLQGFECIANAVFNGQSGQILFRSNGNITRELTNITFGFRTRDANVIILHAEKEPEFLNISIQDSRLFFQLQSGNSFYMLSLTSLQSVNDGTWHEVTLSMTDPLSQTSRWQMEVDNETPFVTSTIATGSLNFLKDNTDIYVGDRAIDNIKGLQGCLSTIEIGGIYLSYFENVHGFINKPQEEQFLKISTNSVVTGCLQLNVCNSNPCLHGGNCEDIYSSYHCSCPLGWSGKHCELNIDECFSNPCIHGNCSDRVAAYHCTCEPGYTGVNCEVDIDNCQSHQCANGATCISHTNGYSCLCFGNFTGKFCRQSRLPSTVCGNEKTNLTCYNGGNCTEFQTELKCMCRPGFTGEWCEKDIDECASDPCVNGGLCQDLLNKFQCLCDVAFAGERCEVDLADDLISDIFTTIGSVTVALLLILLLAIVASVVTSNKRATQGTYSPSRQEKEGSRVEMWNLMPPPAMERLI

SEQ ID NO: 58 - protein, 279 aa, Homo sapiens
  NICOTINAMIDE NUCLEOTIDE ADENYLYLTRANSFERASE 1 (NMNAT1) <Accession No.: Q9HAN9.1>
MENSEKTEVVLLACGSFNPITNMHLRLFELAKDYMNGTGRYTVVKGIISPVGDAYKKKGLIPAYHRVIMAELATKNSKWVEVDTWESLQKEWKETLKVLRHHQEKLEASDCDHQQNSPTLERPGRKRKWTETQDSSQKKSLEPKTKAVPKVKLLCGADLLESFAVPNLWKSEDITQIVANYGLICVTRAGNDAQKFIYESDVLWKHRSNIHVVNEWIANDISSTKIRRALRRGQSIRYLVPDLVQEYIEKHNLYSSESEDRNAGVILAPLQRNTAEAKT

SEQ ID NO: 59 - protein, 279 aa, Homo sapiens; identical to SEQ ID NO: 58
  NICOTINAMIDE NUCLEOTIDE ADENYLYLTRANSFERASE 1 (NMNAT1); ISOFORM CRA_A <Accession No.: EAW71635.1>

SEQ ID NO: 60 - protein, 160 aa, Homo sapiens
  NICOTINAMIDE NUCLEOTIDE ADENYLYLTRANSFERASE 1 (NMNAT1), ISOFORM 2 <Accession No.: NP_001284708.1>
MENSEKTEVVLLACGSFNPITNMHLRLFELAKDYMNGTGRYTVVKGIISPVGDAYKKKGLIPAYHRVIMAELATKNSKWVEVDTWESLQKEWKETLKVLRHHQEKLEASDCDHQQNSPTLERPGRKRKWTETQDSSQKKSLEPKTKDGVSLYHPGWSAVA

SEQ ID NO: 61 - protein, 279 aa, Homo sapiens; identical to SEQ ID NO: 58
  NICOTINAMIDE NUCLEOTIDE ADENYLYLTRANSFERASE 1 (NMNAT1), ISOFORM 1 <Accession No.: NP_073624.2>

SEQ ID NO: 62 - protein, 2479 aa, Homo sapiens
  CENTROSOMAL PROTEIN 290 (CEP290); <Accession No.: NP_079390.3>
MPPNINWKEIMKVDPDDLPRQEELADNLLISLSKVEVNELKSEKQENVIHLFRITQSLMKMKAQEVELALEEVEKAGEEQAKFENQLKTKVMKLENELEMAQQSAGGRDTRFLRNEICQLEKQLEQKDRELEDMEKELEKEKKVNEQLALRNEEAENENSKLRRENKRLKKKNEQLCQDIIDYQKQIDSQKETLLSRRGEDSDYRSQLSKKNYELIQYLDEIQTLTEANEKIEVQNQEMRKNLEESVQEMEKMTDEYNRMKAIVHQTDNVIDQLKKENDHYQLQVQELTDLLKSKNEEDDPIMVAVNAKVEEWKLILSSKDDEIIEYQQMLHNLREKLKNAQLDADKSNVMALQQGIQERDSQIKMLTEQVEQYTKEMEKNTCIIEDLKNELQRNKGASTLSQQTHMKIQSTLDILKEKTKEAERTAELAEADAREKDKELVEALKRLKDYESGVYGLEDAVVEIKNCKNQIKIRDREIEILTKEINKLELKISDFLDENEALRERVGLEPKTMIDLTEFRNSKHLKQQQYRAENQILLKEIESLEEERLDLKKKIRQMAQERGKRSATSGLTTEDLNLTENISQGDRISERKLDLLSLKNMSEAQSKNEFLSRELIEKERDLERSRTVIAKFQNKLKELVEENKQLEEGMKEILQAIKEMQKDPDVKGGETSLIIPSLERLVNAIESKNAEGIFDASLHLKAQVDQLTGRNEELRQELRESRKEAINYSQQLAKANLKIDHLEKETSLLRQSEGSNVVFKGIDLPDGIAPSSASIINSQNEYLIHLLQELENKEKKLKNLEDSLEDYNRKFAVIRHQQSLLYKEYLSEKETWKTESKTIKEEKRKLEDQVQQDAIKVKEYNNLLNALQMDSDEMKKILAENSRKITVLQVNEKSLIRQYTTLVELERQLRKENEKQKNELLSMEAEVCEKIGCLQRFKEMAIFKIAALQKVVDNSVSLSELELANKQYNELTAKYRDILQKDNMLVQRTSNLEHLECENISLKEQVESINKELEITKEKLHTIEQAWEQETKLGNESSMDKAKKSITNSDIVSISKKITMLEMKELNERQRAEHCQKMYEHLRTSLKQMEERNFELETKFAELTKINLDAQKVEQMLRDELADSVSKAVSDADRQRILELEKNEMELKVEVSKLREISDIARRQVEILNAQQQSRDKEVESLRMQLLDYQAQSDEKSLIAKLHQHNVSLQLSEATALGKLESITSKLQKMEAYNLRLEQKLDEKEQALYYARLEGRNRAKHLRQTIQSLRRQFSGALPLAQQEKFSKTMIQLQNDKLKIMQEMKNSQQEHRNMENKTLEMELKLKGLEELISTLKDTKGAQKVINWHMKIEELRLQELKLNRELVKDKEEIKYLNNIISEYERTISSLEEEIVQQNKFHEERQMAWDQREVDLERQLDIFDRQQNEILNAAQKFEEATGSIPDPSLPLPNQLEIALRKIKENIRIILETRATCKSLEEKLKEKESALRLAEQNILSRDKVINELRLRLPATAEREKLIAELGRKEMEPKSHHTLKIAHQTIANMQARLNQKEEVLKKYQRLLEKAREEQREIVKKHEEDLHILHHRLELQADSSLNKFKQTAWDLMKQSPTPVPTNKHFIRLAEMEQTVAEQDDSLSSLLVKLKKVSQDLERQREITELKVKEFENIKLQLQENHEDEVKKVKAEVEDLKYLLDQSQKESQCLKSELQAQKEANSRAPTTTMRNLVERLKSQLALKEKQQKALSRALLELRAEMTAAAEERIISATSQKEAHLNVQQIVDRHTRELKTQVEDLNENLLKLKEALKTSKNRENSLTDNLNDLNNELQKKQKAYNKILREKEEIDQENDELKRQIKRLTSGLQGKPLTDNKQSLIEELQRKVKKLENQLEGKVEEVDLKPMKEKNAKEELIRWEEGKKWQAKIEGIRNKLKEKEGEVFTLTKQLNTLKDLFAKADKEKLTLQRKLKTTGMTVDQVLGIRALESEKELEELKKRNLDLENDILYMRAHQALPRDSVVEDLHLQNRYLQEKLHALEKQFSKDTYSKPSISGIESDDHCQREQELQKENLKLSSENIELKFQLEQANKDLPRLKNQVRDLKEMCEFLKKEKAEVQRKLGHVRGSGRSGKTIPELEKTIGLMKKVVEKVQRENEQLKKASGILTSEKMANIEQENEKLKAELEKLKAHLGHQLSMHYESKTKGTEKIIAENERLRKELKKETDAAEKLRIAKNNLEILNEKMTVQLEETGKRLQFAESRGPQLEGADSKSWKSIVVTRMYETKLKELETDIAKKNQSITDLKQLVKEATEREQKVNKYNEDLEQQIKILKHVPEGAETEQGLKRELQVLRLANHQLDKEKAELIHQIEANKDQSGAESTIPDADQLKEKIKDLETQLKMSDLEKQHLKEEIKKLKKELENFDPSFFEEIEDLKYNYKEEVKKNILLEEKVKKLSEQLGVELTSPVAASEEFEDEEESPVNFPIY

SEQ ID NO: 63 - protein, 2769 aa, Homo sapiens
  CENTROSOMAL PROTEIN 290 (CEP290), ISOFORM X1 <Accession No.: XP_011537059.1>
MPPNINWKEIMKVDPDDLPRQEELADNLLISLSKVEVNELKSEKQENVIHLFRITQSLMKMKAQEVELALEEVEKAGEEQAKFENQLKTKVMKLENELEMAQQSAGGRDTRFLRNEICQLEKQLEQKDRELEDMEKELEKEKKVNEQLALRNEEAENENSKLRRENKRLKKKNEQLCQDIIDYQKQIDSQKETLLSRRGEDSDYRSQLSKKNYELIQYLDEIQTLTEANEKIEVQNQEMRKNLEESVQEMEKMTDEYNRMKAIVHQTDNVIDQLKKENDHYQLQVQELTDLLKSKNEEDDPIMVAVNAKVEEWKLILSSKDDEIIEYQQMLHNLREKLKNAQLDADKSNVMALQQGIQERDSQIKMLTEQVEQYTKEMEKNTCIIEDLKNELQRNKGASTLSQQTHMKIQSTLDILKEKTKEAERTAELAEADAREKDKELVEALKRLKDYESGVYGLEDAVVEIKNCKNQIKIRDREIEILTKEINKLELKISDFLDENEALRERVGLEPKTMIDLTEFRNSKHLKQQQYRAENQILLKEIESLEEERLDLKKKIRQMAQERGKRSATSGLTTEDLNLTENISQGDRISERKLDLLSLKNMSEAQSKIRSSDKAELLHRRSSFNTPQSDQNETEENMTIGSLSRMLSEIHHSVESGMHPFVPLTRLSSSMQVKENSTPETITIREIFKAPCLQSSRNLESLVSTFSRESHEEINDICLFSDDCMKKVSRSHQALEKTSFVQKSNSSFHGLSTASDIMQKLSLRQKSAIFCQQIHENRADMDKSQVATLEEEQVHSQVKYADINLKEDIIKSEVPLQTEILKNKLKVNLPDPVSITAQSKLSQINSLENLIEQLRRELVFLRSQNEIIAQEFLIKEAECRNADIELEHHRSQAEQNEFLSRELIEKERDLERSRTVIAKFQNKLKELVEENKQLEEGMKEILQAIKEMQKDPDVKGGETSLIIPSLERLVNAIESKNAEGIFDASLHLKAQVDQLTGRNEELRQELRESRKEAINYSQQLAKANLKIDHLEKETSLLRQSEGSNVVFKGIDLPDGIAPSSASIINSQNEYLIHLLQELENKEKKLKNLEDSLEDYNRKFAVIRHQQSLLYKEYLSEKETWKTESKTIKEEKRKLEDQVQQDAIKVKEYNNLLNALQMDSDEMKKILAENSRKITVLQVNEKSLIRQYTTLVELERQLRKENEKQKNELLSMEAEVCEKIGCLQRFKEMAIFKIAALQKVVDNSVSLSELELANKQYNELTAKYRDILQKDNMLVQRTSNLEHLECENISLKEQVESINKELEITKEKLHTIEQAWEQETKLGNESSMDKAKKSITNSDIVSISKKITMLEMKELNERQRAEHCQKMYEHLRTSLKQMEERNFELETKFAELTKINLDAQKVEQMLRDELADSVSKAVSDADRQRILELEKNEMELKVEVSKLREISDIARRQVEILNAQQQSRDKEVESLRMQLLDYQAQSDEKSLIAKLHQHNVSLQLSEATALGKLESITSKLQKMEAYNLRLEQKLDEKEQALYYARLEGRNRAKHLRQTIQSLRRQFSGALPLAQQEKFSKTMIQLQNDKLKIMQEMKNSQQEHRNMENKTLEMELKLKGLEELISTLKDTKGAQKVINWHMKIEELRLQELKLNRELVKDKEEIKYLNNIISEYERTISSLEEEIVQQNKFHEERQMAWDQREVDLERQLDIFDRQQNEILNAAQKFEEATGSIPDPSLPLPNQLEIALRKIKENIRIILETRATCKSLEEKLKEKESALRLAEQNILSRDKVINELRLRLPATAEREKLIAELGRKEMEPKSHHTLKIAHQTIANMQARLNQKEEVLKKYQRLLEKAREEQREIVKKHEEDLHILHHRLELQADSSLNKFKQTAWDLMKQSPTPVPTNKHFIRLAEMEQTVAEQDDSLSSLLVKLKKVSQDLERQREITELKVKEFENIKLQLQENHEDEVKKVKAEVEDLKYLLDQSQKESQCLKSELQAQKEANSRAPTTTMRNLVERLKSQLALKEKQQKALSRALLELRAEMTAAAEERIISATSQKEAHLNVQQIVDRHTRELKTQVEDLNENLLKLKEALKTSKNRENSLTDNLNDLNNELQKKQKAYNKILREKEEIDQENDELKRQIKRLTSGLQGKPLTDNKQSLIEELQRKVKKLENQLEGKVEEVDLKPMKEKNAKEELIRWEEGKKWQAKIEGIRNKLKEKEGEVFTLTKQLNTLKDLFAKADKEKLTLQRKLKTTGMTVDQVLGIRALESEKELEELKKRNLDLENDILYMRAHQALPRDSVVEDLHLQNRYLQEKLHALEKQFSKDTYSKPSQNQISGIESDDHCQREQELQKENLKLSSENIELKFQLEQANKDLPRLKNQVRDLKEMCEFLKKEKAEVQRKLGHVRGSGRSGKTIPELEKTIGLMKKVVEKVQRENEQLKKASGILTSEKMANIEQENEKLKAELEKLKAHLGHQLSMHYESKTKGTEKIIAENERLRKELKKETDAAEKLRIAKNNLEILNEKMTVQLEETGKRLQFAESRGPQLEGADSKSWKSIVVTRMYETKLKELETDIAKKNQSITDLKQLVKEATEREQKVNKYNEDLEQQIKILKHVPEGAETEQGLKRELQVLRLANHQLDKEKAELIHQIEANKDQSGAESTIPDADQLKEKIKDLETQLKMSDLEKQHLKEEIKKLKKELENFDPSFFEEIEDLKYNYKEEVKKNILLEEKVKKLSEQLGVELTSPVAASEEFEDEEESPVNFPIY

SEQ ID NO: 64 - protein, 2768 aa, Homo sapiens
  CENTROSOMAL PROTEIN 290 (CEP290), ISOFORM X2 <Accession No.: XP_011537060.1>
MPPNINWKEIMKVDPDDLPRQEELADNLLISLSKVEVNELKSEKQENVIHLFRITQSLMKMKAQEVELALEEVEKAGEEQAKFENQLKTKVMKLENELEMAQQSAGGRDTRFLRNEICQLEKQLEQKDRELEDMEKELEKEKKVNEQLALRNEEAENENSKLRRENKRLKKKNEQLCQDIIDYQKQIDSQKETLLSRRGEDSDYRSQLSKKNYELIQYLDEIQTLTEANEKIEVQNQEMRKNLEESVQEMEKMTDEYNRMKAIVHQTDNVIDQLKKENDHYQLQVQELTDLLKSKNEEDDPIMVAVNAKVEEWKLILSSKDDEIIEYQQMLHNLREKLKNAQLDADKSNVMALQQGIQERDSQIKMLTEQVEQYTKEMEKNTCIIEDLKNELQRNKGASTLSQQTHMKIQSTLDILKEKTKEAERTAELAEADAREKDKELVEALKRLKDYESGVYGLEDAVVEIKNCKNQIKIRDREIEILTKEINKLELKISDFLDENEALRERVGLEPKTMIDLTEFRNSKHLKQQQYRAENQILLKEIESLEEERLDLKKKIRQMAQERGKRSATSGLTTEDLNLTENISQGDRISERKLDLLSLKNMSEAQSKIRSSDKAELLHRRSSFNTPQSDQNETEENMTIGSLSRMLSEIHHSVESGMHPFVPLTRLSSSMQVKENSTPETITIREIFKAPCLQSSRNLESLVSTFSRESHEEINDICLFSDDCMKKVSRSHQALEKTSFVQKSNSSFHGLSTASDIMQKLSLRQKSAIFCQQIHENRADMDKSQVATLEEEQVHSQVKYADINLKEDIIKSEVPLQTEILKNKLKVNLPDPVSITAQSKLSQINSLENLIEQLRRELVFLRSQNEIIAQEFLIKEAECRNADIELEHHRSQAEQNEFLSRELIEKERDLERSRTVIAKFQNKLKELVEENKQLEEGMKEILQAIKEMQKDPDVKGGETSLIIPSLERLVNAIESKNAEGIFDASLHLKAQVDQLTGRNEELRQELRESRKEAINYSQQLAKANLKIDHLEKETSLLRQSEGSNVVFKGIDLPDGIAPSSASIINSQNEYLIHLLQELENKEKKLKNLEDSLEDYNRKFAVIRHQQSLLYKEYLSEKETWKTESKTIKEEKRKLEDQVQQDAIKVKEYNNLLNALQMDSDEMKKILAENSRKITVLQVNEKSLIRQYTTLVELERQLRKENEKQKNELLSMEAEVCEKIGCLQRFKEMAIFKIAALQKVVDNSVSLSELELANKQYNELTAKYRDILQKDNMLVQRTSNLEHLECENISLKEQVESINKELEITKEKLHTIEQAWEQETKLGNESSMDKAKKSITNSDIVSISKKITMLEMKELNERQRAEHCQKMYEHLRTSLKQMEERNFELETKFAELTKINLDAQKVEQMLRDELADSVSKAVSDADRQRILELEKNEMELKVEVSKLREISDIARRQVEILNAQQQSRDKEVESLRMQLLDYQAQSDEKSLIAKLHQHNVSLQLSEATALGKLESITSKLQKMEAYNLRLEQKLDEKEQALYYARLEGRNRAKHLRQTIQSLRRQFSGALPLAQQEKFSKTMIQLQNDKLKIMQEMKNSQQEHRNMENKTLEMELKLKGLEELISTLKDTKGAQKVINWHMKIEELRLQELKLNRELVKDKEEIKYLNNIISEYERTISSLEEEIVQQNKFHEERQMAWDQREVDLERQLDIFDRQQNEILNAAQKFEEATGSIPDPSLPLPNQLEIALRKIKENIRIILETRATCKSLEEKLKEKESALRLAEQNILSRDKVINELRLRLPATAEREKLIAELGRKEMEPKSHHTLKIAHQTIANMQARLNQKEEVLKKYQRLLEKAREEQREIVKKHEEDLHILHHRLELQADSSLNKFKQTAWDLMKQSPTPVPTNKHFIRLAEMEQTVAEQDDSLSSLLVKLKKVSQDLERQREITELKVKEFENIKLQLQENHEDEVKKVKAEVEDLKYLLDQSQKESQCLKSELQAQKEANSRAPTTTMRNLVERLKSQLALKEKQQKALSRALLELRAEMTAAAEERIISATSQKEAHLNVQQIVDRHTRELKTQVEDLNENLLKLKEALKTSKNRENSLTDNLNDLNNELQKKQKAYNKILREKEEIDQENDELKRQIKRLTSGLQGKPLTDNKQSLIEELQRKVKKLENQLEGKVEEVDLKPMKEKNAKEELIRWEEGKKWQAKIEGIRNKLKEKEGEVFTLTKQLNTLKDLFAKADKEKLTLQRKLKTTGMTVDQVLGIRALESEKELEELKKRNLDLENDILYMRAHQALPRDSVVEDLHLQNRYLQEKLHALEKQFSKDTYSKPSNQISGIESDDHCQREQELQKENLKLSSENIELKFQLEQANKDLPRLKNQVRDLKEMCEFLKKEKAEVQRKLGHVRGSGRSGKTIPELEKTIGLMKKVVEKVQRENEQLKKASGILTSEKMANIEQENEKLKAELEKLKAHLGHQLSMHYESKTKGTEKIIAENERLRKELKKETDAAEKLRIAKNNLEILNEKMTVQLEETGKRLQFAESRGPQLEGADSKSWKSIVVTRMYETKLKELETDIAKKNQSITDLKQLVKEATEREQKVNKYNEDLEQQIKILKHVPEGAETEQGLKRELQVLRLANHQLDKEKAELIHQIEANKDQSGAESTIPDADQLKEKIKDLETQLKMSDLEKQHLKEEIKKLKKELENFDPSFFEEIEDLKYNYKEEVKKNILLEEKVKKLSEQLGVELTSPVAASEEFEDEEESPVNFPIY

SEQ ID NO: 65 - protein, 2766 aa, Homo sapiens
  CENTROSOMAL PROTEIN 290 (CEP290), ISOFORM X3 <Accession No.: XP_011537061.1>
MPPNINWKEIMKVDPDDLPRQEELADNLLISLSKVEVNELKSEKQENVIHLFRITQSLMKMKAQEVELALEEVEKAGEEQAKFENQLKTKVMKLENELEMAQQSAGGRDTRFLRNEICQLEKQLEQKDRELEDMEKELEKEKKVNEQLALRNEEAENENSKLRRENKRLKKKNEQLCQDIIDYQKQIDSQKETLLSRRGEDSDYRSQLSKKNYELIQYLDEIQTLTEANEKIEVQNQEMRKNLEESVQEMEKMTDEYNRMKAIVHQTDNVIDQLKKENDHYQLQVQELTDLLKSKNEEDDPIMVAVNAKVEEWKLILSSKDDEIIEYQQMLHNLREKLKNAQLDADKSNVMALQQGIQERDSQIKMLTEQVEQYTKEMEKNTCIIEDLKNELQRNKGASTLSQQTHMKIQSTLDILKEKTKEAERTAELAEADAREKDKELVEALKRLKDYESGVYGLEDAVVEIKNCKNQIKIRDREIEILTKEINKLELKISDFLDENEALRERVGLEPKTMIDLTEFRNSKHLKQQQYRAENQILLKEIESLEEERLDLKKKIRQMAQERGKRSATSGLTTEDLNLTENISQGDRISERKLDLLSLKNMSEAQSKIRSSDKAELLHRRSSFNTPQSDQNETEENMTIGSLSRMLSEIHHSVESGMHPFVPLTRLSSSMQVKENSTPETITIREIFKAPCLQSSRNLESLVSTFSRESHEEINDICLFSDDCMKKVSRSHQALEKTSFVQKSNSSFHGLSTASDIMQKLSLRQKSAIFCQQIHENRADMDKSQVATLEEEQVHSQVKYADINLKEDIIKSEVPLQTEILKNKLKVNLPDPVSITAQSKLSQINSLENLIEQLRRELVFLRSQNEIIAQEFLIKEAECRNADIELEHHRSQAEQNEFLSRELIEKERDLERSRTVIAKFQNKLKELVEENKQLEEGMKEILQAIKEMQKDPDVKGGETSLIIPSLERLVNAIESKNAEGIFDASLHLKAQVDQLTGRNEELRQELRESRKEAINYSQQLAKANLKIDHLEKETSLLRQSEGSNVVFKGIDLPDGIAPSSASIINSQNEYLIHLLQELENKEKKLKNLEDSLEDYNRKFAVIRHQQSLLYKEYLSEKETWKTESKTIKEEKRKLEDQVQQDAIKVKEYNNLLNALQMDSDEMKKILAENSRKITVLQVNEKSLIRQYTTLVELERQLRKENEKQKNELLSMEAEVCEKIGCLQRFKEMAIFKIAALQKVVDNSVSLSELELANKQYNELTAKYRDILQKDNMLVQRTSNLEHLECENISLKEQVESINKELEITKEKLHTIEQAWEQETKLGNESSMDKAKKSITNSDIVSISKKITMLEMKELNERQRAEHCQKMYEHLRTSLKQMEERNFELETKFAELTKINLDAQKVEQMLRDELADSVSKAVSDADRQRILELEKNEMELKVEVSKLREISDIARRQVEILNAQQQSRDKEVESLRMQLLDYQAQSDEKSLIAKLHQHNVSLQLSEATALGKLESITSKLQKMEAYNLRLEQKLDEKEQALYYARLEGRNRAKHLRQTIQSLRRQFSGALPLAQQEKFSKTMIQLQNDKLKIMQEMKNSQQEHRNMENKTLEMELKLKGLEELISTLKDTKGAQKVINWHMKIEELRLQELKLNRELVKDKEEIKYLNNIISEYERTISSLEEEIVQQNKFHEERQMAWDQREVDLERQLDIFDRQQNEILNAAQKFEEATGSIPDPSLPLPNQLEIALRKIKENIRIILETRATCKSLEEKLKEKESALRLAEQNILSRDKVINELRLRLPATAEREKLIAELGRKEMEPKSHHTLKIAHQTIANMQARLNQKEEVLKKYQRLLEKAREEQREIVKKHEEDLHILHHRLELQADSSLNKFKQTAWDLMKQSPTPVPTNKHFIRLAEMEQTVAEQDDSLSSLLVKLKKVSQDLERQREITELKVKEFENIKLQLQENHEDEVKKVKAEVEDLKYLLDQSQKESQCLKSELQAQKEANSRAPTTTMRNLVERLKSQLALKEKQQKALSRALLELRAEMTAAAEERIISATSQKEAHLNVQQIVDRHTRELKTQVEDLNENLLKLKEALKTSKNRENSLTDNLNDLNNELQKKQKAYNKILREKEEIDQENDELKRQIKRLTSGLQGKPLTDNKQSLIEELQRKVKKLENQLEGKVEEVDLKPMKEKNAKEELIRWEEGKKWQAKIEGIRNKLKEKEGEVFTLTKQLNTLKDLFAKADKEKLTLQRKLKTTGMTVDQVLGIRALESEKELEELKKRNLDLENDILYMRAHQALPRDSVVEDLHLQNRYLQEKLHALEKQFSKDTYSKPSISGIESDDHCQREQELQKENLKLSSENIELKFQLEQANKDLPRLKNQVRDLKEMCEFLKKEKAEVQRKLGHVRGSGRSGKTIPELEKTIGLMKKVVEKVQRENEQLKKASGILTSEKMANIEQENEKLKAELEKLKAHLGHQLSMHYESKTKGTEKIIAENERLRKELKKETDAAEKLRIAKNNLEILNEKMTVQLEETGKRLQFAESRGPQLEGADSKSWKSIVVTRMYETKLKELETDIAKKNQSITDLKQLVKEATEREQKVNKYNEDLEQQIKILKHVPEGAETEQGLKRELQVLRLANHQLDKEKAELIHQIEANKDQSGAESTIPDADQLKEKIKDLETQLKMSDLEKQHLKEEIKKLKKELENFDPSFFEEIEDLKYNYKEEVKKNILLEEKVKKLSEQLGVELTSPVAASEEFEDEEESPVNFPIY

SEQ ID NO: 66 - protein, 2728 aa, Homo sapiens
  CENTROSOMAL PROTEIN 290 (CEP290), ISOFORM X4 <Accession No.: XP_011537062.1>
MPPNINWKEIMKVDPDDLPRQEELADNLLISLSKVEVNELKSEKQENVIHLFRITQSLMKMKAQEVELALEEVEKAGEEQAKFENQLKTKVMKLENELEMAQQSAGGRDTRFLRNEICQLEKQLEQKDRELEDMEKELEKEKKVNEQLALRNEEAENENSKLRRENKRLKKKNEQLCQDIIDYQKQIDSQKETLLSRRGEDSDYRSQLSKKNYELIQYLDEIQTLTEANEKIEVQNQEMRKNLEESVQEMEKMTDEYNRMKAIVHQTDNVIDQLKKENDHYQLQVQELTDLLKSKNEEDDPIMVAVNAKVEEWKLILSSKDDEIIEYQQMLHNLREKLKNAQLDADKSNVMALQQGIQERDSQIKMLTEQVEQYTKEMEKNTCIIEDLKNELQRNKGASTLSQQTHMKIQSTLDILKEKTKEAERTAELAEADAREKDKELVEALKRLKDYESGVYGLEDAVVEIKNCKNQIKIRDREIEILTKEINKLELKISDFLDENEALRERVGLEPKTMIDLTEFRNSKHLKQQQYRAENQILLKEIESLEEERLDLKKKIRQMAQERGKRSATSGLTTEDLNLTENISQGDRISERKLDLLSLKNMSEAQSKIRSSDKAELLHRRSSFNTPQSDQNETEENMTIGSLSRMLSEIHHSVESGMHPFVPLTRLSSSMQVKENSTPETITIREIFKAPCLQSSRNLESLVSTFSRESHEEINDICLFSDDCMKKVSRSHQALEKTSFVQKSNSSFHGLSTASDIMQKLSLRQKSAIFCQQIHENRADMDKSQVATLEEEQVHSQVKYADINLKEDIIKSEVPLQTEILKNKLKVNLPDPVSITAQSKLSQINSLENLIEQLRRELVFLRSQNEIIAQEFLIKEAECRNADIELEHHRSQAEQNEFLSRELIEKERDLERSRTVIAKFQNKLKELVEENKQLEEGMKEILQAIKEMQKDPDVKGGETSLIIPSLERLVNAIESKNAEGIFDASLHLKAQVDQLTGRNEELRQELRESRKEAINYSQQLAKANLKIDHLEKETSLLRQSEGSNVVFKGIDLPDGIAPSSASIINSQNEYLIHLLQELENKEKKLKNLEDSLEDYNRKFAVIRHQQSLLYKEYLSEKETWKTESKTIKEEKRKLEDQVQQDAIKVKEYNNLLNALQMDSDEMKKILAENSRKITVLQVNEKSLIRQYTTLVELERQLRKENEKQKNELLSMEAEVCEKIGCLQRFKEMAIFKIAALQKVVDNSVSLSELELANKQYNELTAKYRDILQKDNMLVQRTSNLEHLECENISLKEQVESINKELEITKEKLHTIEQAWEQETKLGNESSMDKAKKSITNSDIVSISKKITMLEMKELNERQRAEHCQKMYEHLRTSLKQMEERNFELETKFAELTKINLDAQKVEQMLRDELADSVSKAVSDADRQRILELEKNEMELKVEVSKLREISDIARRQVEILNAQQQSRDKEVESLRMQLLDYQAQSDEKSLIAKLHQHNVSLQLSEATALGKLESITSKLQKMEAYNLRLEQKLDEKEQALYYARLEGRNRAKHLRQTIQSLRRQFSGALPLAQQEKFSKTMIQLQNDKLKIMQEMKNSQQEHRNMENKTLEMELKLKGLEELISTLKDTKGAQKVINWHMKIEELRLQELKLNRELVKDKEEIKYLNNIISEYERTISSLEEEIVQQNKFHEERQMAWDQREVDLERQLDIFDRQQNEILNAAQKFEEATGSIPDPSLPLPNQLEIALRKIKENIRIILETRATCKSLEEKLKEKESALRLAEQNILSRDKVINELRLRLPATAEREKLIAELGRKEMEPKSHHTLKIAHQTIANMQARLNQKEEVLKKYQRLLEKAREEQREIVKKHEEDLHILHHRLELQADSSLNKFKQTAWDLMKQSPTPVPTNKHFIRLAEMEQTVAEQDDSLSSLLVKLKKVSQDLERQREITELKVKEFENIKLQLQENHEDEVKKVKAEVEDLKYLLDQSQKESQCLKSELQAQKEANSRAPTTTMRNLVERLKSQLALKEKQQKALSRALLELRAEMTAAAEERIISATSQKEAHLNVQQIVDRHTRELKTQVEDLNENLLKLKEALKTSKNRENSLTDNLNDLNNELQKKQKAYNKILREKEEIDQENDELKRQIKRLTSGLQGKPLTDNKQSLIEELQRKVKKLENQLEGKVEEVDLKPMKEKNAKEELIRWEEGKKWQAKIEGIRNKLKEKEGEVFTLTKQLNTLKDLFAKADKEKLTLQRKLKTTGMTVDQVLGIRALESEKELEELKKRNLDLENDILYMRAHQALPRDSVVEDLHLQNRYLQEKLHALEKQFSKDTYSKPSQNQISGIESDDHCQREQELQKENLKLSSENIELKFQLEQANKDLPRLKNQVRDLKEMCEFLKKEKAEVQRKLGHVRGSGRSGKTIPELEKTIGLMKKVVEKVQRENEQLKKASGILTSEKMANIEQENEKLKETDAAEKLRIAKNNLEILNEKMTVQLEETGKRLQFAESRGPQLEGADSKSWKSIVVTRMYETKLKELETDIAKKNQSITDLKQLVKEATEREQKVNKYNEDLEQQIKILKHVPEGAETEQGLKRELQVLRLANHQLDKEKAELIHQIEANKDQSGAESTIPDADQLKEKIKDLETQLKMSDLEKQHLKEEIKKLKKELENFDPSFFEEIEDLKYNYKEEVKKNILLEEKVKKLSEQLGVELTSPVAASEEFEDEEESPVNFPIY

SEQ ID NO: 67 - protein, 2725 aa, Homo sapiens
  CENTROSOMAL PROTEIN 290 (CEP290), ISOFORM X5 <Accession No.: XP_016875469.1>
MPPNINWKEIMKVDPDDLPRQEELADNLLISLSKVEVNELKSEKQENVIHLFRITQSLMKMKAQEVELALEEVEKAGEEQAKFENQLKTKVMKLENELEMAQQSAGGRDTRFLRNEICQLEKQLEQKDRELEDMEKELEKEKKVNEQLALRNEEAENENSKLRRENKRLKKKNEQLCQDIIDYQKQIDSQKETLLSRRGEDSDYRSQLSKKNYELIQYLDEIQTLTEANEKIEVQNQEMRKNLEESVQEMEKMTDEYNRMKAIVHQTDNVIDQLKKENDHYQLQVQELTDLLKSKNEEDDPIMVAVNAKVEEWKLILSSKDDEIIEYQQMLHNLREKLKNAQLDADKSNVMALQQGIQERDSQIKMLTEQVEQYTKEMEKNTCIIEDLKNELQRNKGASTLSQQTHMKIQSTLDILKEKTKEAERTAELAEADAREKDKELVEALKRLKDYESGVYGLEDAVVEIKNCKNQIKIRDREIEILTKEINKLELKISDFLDENEALRERVGLEPKTMIDLTEFRNSKHLKQQQYRAENQILLKEIESLEEERLDLKKKIRQMAQERGKRSATSGLTTEDLNLTENISQGDRISERKLDLLSLKNMSEAQSKIRSSDKAELLHRRSSFNTPQSDQNETEENMTIGSLSRMLSEIHHSVESGMHPFVPLTRLSSSMQVKENSTPETITIREIFKAPCLQSSRNLESLVSTFSRESHEEINDICLFSDDCMKKVSRSHQALEKTSFVQKSNSSFHGLSTASDIMQKLSLRQKSAIFCQQIHENRADMDKSQVATLEEEQVHSQVKYADINLKEDIIKSEVPLQTEILKNKLKVNLPDPVSITAQSKLSQINSLENLIEQLRRELVFLRSQNEIIAQEFLIKEAECRNADIELEHHRSQAEQNEFLSRELIEKERDLERSRTVIAKFQNKLKELVEENKQLEEGMKEILQAIKEMQKDPDVKGGETSLIIPSLERLVNAIESKNAEGIFDASLHLKAQVDQLTGRNEELRQELRESRKEAINYSQQLAKANLKIDHLEKETSLLRQSEGSNVVFKGIDLPDGIAPSSASIINSQNEYLIHLLQELENKEKKLKNLEDSLEDYNRKFAVIRHQQSLLYKEYLSEKETWKTESKTIKEEKRKLEDQVQQDAIKVKEYNNLLNALQMDSDEMKKILAENSRKITVLQVNEKSLIRQYTTLVELERQLRKENEKQKNELLSMEAEVCEKIGCLQRFKEMAIFKIAALQKVVDNSVSLSELELANKQYNELTAKYRDILQKDNMLVQRTSNLEHLECENISLKEQVESINKELEITKEKLHTIEQAWEQETKLGNESSMDKAKKSITNSDIVSISKKITMLEMKELNERQRAEHCQKMYEHLRTSLKQMEERNFELETKFAELTKINLDAQKVEQMLRDELADSVSKAVSDADRQRILELEKNEMELKVEVSKLREISDIARRQVEILNAQQQSRDKEVESLRMQLLDYQAQSDEKSLIAKLHQHNVSLQLSEATALGKLESITSKLQKMEAYNLRLEQKLDEKEQALYYARLEGRNRAKHLRQTIQSLRRQFSGALPLAQQEKFSKTMIQLQNDKLKIMQEMKNSQQEHRNMENKTLEMELKLKGLEELISTLKDTKGAQKVINWHMKIEELRLQELKLNRELVKDKEEIKYLNNIISEYERTISSLEEEIVQQNKFHEERQMAWDQREVDLERQLDIFDRQQNEILNAAQKFEEATGSIPDPSLPLPNQLEIALRKIKENIRIILETRATCKSLEEKLKEKESALRLAEQNILSRDKVINELRLRLPATAEREKLIAELGRKEMEPKSHHTLKIAHQTIANMQARLNQKEEVLKKYQRLLEKAREEQREIVKKHEEDLHILHHRLELQADSSLNKFKQTAWDLMKQSPTPVPTNKHFIRLAEMEQTVAEQDDSLSSLLVKLKKVSQDLERQREITELKVKEFENIKLQLQENHEDEVKKVKAEVEDLKYLLDQSQKESQCLKSELQAQKEANSRAPTTTMRNLVERLKSQLALKEKQQKALSRALLELRAEMTAAAEERIISATSQKEAHLNVQQIVDRHTRELKTQVEDLNENLLKLKEALKTSKNRENSLTDNLNDLNNELQKKQKAYNKILREKEEIDQENDELKRQIKRLTSGLQGKPLTDNKQSLIEELQRKVKKLENQLEGKVEEVDLKPMKEKNAKEELIRWEEGKKWQAKIEGIRNKLKEKEGEVFTLTKQLNTLKDLFAKADKEKLTLQRKLKTTGMTVDQVLGIRALESEKELEELKKRNLDLENDILYMRAHQALPRDSVVEDLHLQNRYLQEKLHALEKQFSKDTYSKPSISGIESDDHCQREQELQKENLKLSSENIELKFQLEQANKDLPRLKNQVRDLKEMCEFLKKEKAEVQRKLGHVRGSGRSGKTIPELEKTIGLMKKVVEKVQRENEQLKKASGILTSEKMANIEQENEKLKETDAAEKLRIAKNNLEILNEKMTVQLEETGKRLQFAESRGPQLEGADSKSWKSIVVTRMYETKLKELETDIAKKNQSITDLKQLVKEATEREQKVNKYNEDLEQQIKILKHVPEGAETEQGLKRELQVLRLANHQLDKEKAELIHQIEANKDQSGAESTIPDADQLKEKIKDLETQLKMSDLEKQHLKEEIKKLKKELENFDPSFFEEIEDLKYNYKEEVKKNILLEEKVKKLSEQLGVELTSPVAASEEFEDEEESPVNFPIY

SEQ ID NO: 68 - protein, 2714 aa, Homo sapiens
  CENTROSOMAL PROTEIN 290 (CEP290), ISOFORM X6 <Accession No.: XP_011537063.1>
MPPNINWKEIMKVDPDDLPRQEELADNLLISLSKVEVNELKSEKQENVIHLFRITQSLMKMKAQEVELALEEVEKAGEEQAKFENQLKTKVMKLENELEMAQQSAGGRDTRFLRNEICQLEKQLEQKDRELEDMEKELEKEKKVNEQLALRNEEAENENSKLRRENKRLKKKNEQLCQDIIDYQKQIDSQKETLLSRRGEDSDYRSQLSKKNYELIQYLDEIQTLTEANEKIEVQNQEMRKNLEESVQEMEKMTDEYNRMKAIVHQTDNVIDQLKKENDHYQLQVQELTDLLKSKNEEDDPIMVAVNAKVEEWKLILSSKDDEIIEYQQMLHNLREKLKNAQLDADKSNVMALQQGIQERDSQIKMLTEQVEQYTKEMEKNTCIIEDLKNELQRNKGASTLSQQTHMKIQSTLDILKEKTKEAERTAELAEADAREKDKELVEALKRLKDYESGVYGLEDAVVEIKNCKNQIKIRDREIEILTKEINKLELKISDFLDENEALRERVGLEPKTMIDLTEFRNSKHLKQQQYRAENQILLKEIESLEEERLDLKKKIRQMAQERGKRSATSGLTTEDLNLTENISQGDRISERKLDLLSLKNMSEAQSKIRSSDKAELLHRRSSFNTPQSDQNETEENMTIGSLSRMLSEIHHSVESGMHPFVPLTRLSSSMQVKENSTPETITIREIFKAPCLQSSRNLESLVSTFSRESHEEINDICLFSDDCMKKVSRSHQALEKTSFVQKSNSSFHGLSTASDIMQKLSLRQKSAIFCQQIHENRADMDKSQVATLEEEQVHSQVKYADINLKEDIIKSEVPLQTEILKNKLKVNLPDPVSITAQSKLSQINSLENLIEQLRRELVFLRSQNEIIAQEFLIKEAECRNADIELEHHRSQAEQNEFLSRELIEKERDLERSRTVIAKFQNKLKELVEENKQLEEGMKEILQAIKEMQKDPDVKGGETSLIIPSLERLVNAIESKNAEGIFDASLHLKAQVDQLTGRNEELRQELRESRKEAINYSQQLAKANLKIDHLEKETSLLRQSEGSNVVFKGIDLPDGIAPSSASIINSQNEYLIHLLQELENKEKKLKNLEDSLEDYNRKFAVIRHQQSLLYKEYLSEKETWKTESKTIKEEKRKLEDQVQQDAIKVKEYNNLLNALQMDSDEMKKILAENSRKITVLQVNEKSLIRQYTTLVELERQLRKENEKQKNELLSMEAEVCEKIGCLQRFKEMAIFKIAALQKVVDNSVSLSELELANKQYNELTAKYRDILQKDNMLVQRTSNLEHLECENISLKEQVESINKELEITKEKLHTIEQAWEQETKLGNESSMDKAKKSITNSDIVSISKKITMLEMKELNERQRAEHCQKMYEHLRTSLKQMEERNFELETKFAELTKINLDAQKVEQMLRDELADSVSKAVSDADRQRILELEKNEMELKVEVSKLREISDIARRQVEILNAQQQSRDKEVESLRMQLLDYQAQSDEKSLIAKLHQHNVSLQLSEATALGKLESITSKLQKMEAYNLRLEQKLDEKEQALYYARLEGRNRAKHLRQTIQSLRRQFSGALPLAQQEKFSKTMIQLQNDKLKIMQEMKNSQQEHRNMENKTLEMELKLKGLEELISTLKDTKGAQKVINWHMKIEELRLQELKLNRELVKDKEEIKYLNNIISEYERTISSLEEEIVQQNKFHEERQMAWDQREVDLERQLDIFDRQQNEILNAAQKFEEATGSIPDPSLPLPNQLEIALRKIKENIRIILETRATCKSLEEKLKEKESALRLAEQNILSRDKVINELRLRLPATAEREKLIAELGRKEMEPKSHHTLKIAHQTIANMQARLNQKEEVLKKYQRLLEKAREEQREIVKKHEEDLHILHHRLELQADSSLNKFKQTAWDLMKQSPTPVPTNKHFIRLAEMEQTVAEQDDSLSSLLVKLKKVSQDLERQREITELKVKEFENIKLQLQENHEDEVKKVKAEVEDLKYLLDQSQKESQCLKSELQAQKEANSRAPTTTMRNLVERLKSQLALKEKQQKALSRALLELRAEMTAAAEERIISATSQKEAHLNVQQIVDRHTRELKTQVEDLNENLLKLKEALKTSKNRENSLTDNLNDLNNELQKKQKAYNKILREKEEIDQENDELKRQIKRLTSGLQGKPLTDNKQSLIEELQRKVKKLENQLEGKVEEVDLKPMKEKNAKEELIRWEEGKKWQAKIEGIRNKLKEKEGEVFTLTKQLNTLKDLFAKADKEKLTLQRKLKTTGMTVDQVLGIRALESEKELEELKKRNLDLENDILYMRAHQALPRDSVVEDLHLQNRYLQEKLHALEKQFSKDTYSKPSQNQISGIESDDHCQREQELQKENLKLSSENIELKFQLEQANKDLPRLKNQVRDLKEMCEFLKKEKAEVQRKLGHVRGAELEKLKAHLGHQLSMHYESKTKGTEKIIAENERLRKELKKETDAAEKLRIAKNNLEILNEKMTVQLEETGKRLQFAESRGPQLEGADSKSWKSIVVTRMYETKLKELETDIAKKNQSITDLKQLVKEATEREQKVNKYNEDLEQQIKILKHVPEGAETEQGLKRELQVLRLANHQLDKEKAELIHQIEANKDQSGAESTIPDADQLKEKIKDLETQLKMSDLEKQHLKEEIKKLKKELENFDPSFFEEIEDLKYNYKEEVKKNILLEEKVKKLSEQLGVELTSPVAASEEFEDEEESPVNFPIY

SEQ ID NO: 69 - protein, 2711 aa, Homo sapiens
  CENTROSOMAL PROTEIN 290 (CEP290), ISOFORM X7 <Accession No.: XM_017019981.2>
MPPNINWKEIMKVDPDDLPRQEELADNLLISLSKVEVNELKSEKQENVIHLFRITQSLMKMKAQEVELALEEVEKAGEEQAKFENQLKTKVMKLENELEMAQQSAGGRDTRFLRNEICQLEKQLEQKDRELEDMEKELEKEKKVNEQLALRNEEAENENSKLRRENKRLKKKNEQLCQDIIDYQKQIDSQKETLLSRRGEDSDYRSQLSKKNYELIQYLDEIQTLTEANEKIEVQNQEMRKNLEESVQEMEKMTDEYNRMKAIVHQTDNVIDQLKKENDHYQLQVQELTDLLKSKNEEDDPIMVAVNAKVEEWKLILSSKDDEIIEYQQMLHNLREKLKNAQLDADKSNVMALQQGIQERDSQIKMLTEQVEQYTKEMEKNTCIIEDLKNELQRNKGASTLSQQTHMKIQSTLDILKEKTKEAERTAELAEADAREKDKELVEALKRLKDYESGVYGLEDAVVEIKNCKNQIKIRDREIEILTKEINKLELKISDFLDENEALRERVGLEPKTMIDLTEFRNSKHLKQQQYRAENQILLKEIESLEEERLDLKKKIRQMAQERGKRSATSGLTTEDLNLTENISQGDRISERKLDLLSLKNMSEAQSKIRSSDKAELLHRRSSFNTPQSDQNETEENMTIGSLSRMLSEIHHSVESGMHPFVPLTRLSSSMQVKENSTPETITIREIFKAPCLQSSRNLESLVSTFSRESHEEINDICLFSDDCMKKVSRSHQALEKTSFVQKSNSSFHGLSTASDIMQKLSLRQKSAIFCQQIHENRADMDKSQVATLEEEQVHSQVKYADINLKEDIIKSEVPLQTEILKNKLKVNLPDPVSITAQSKLSQINSLENLIEQLRRELVFLRSQNEIIAQEFLIKEAECRNADIELEHHRSQAEQNEFLSRELIEKERDLERSRTVIAKFQNKLKELVEENKQLEEGMKEILQAIKEMQKDPDVKGGETSLIIPSLERLVNAIESKNAEGIFDASLHLKAQVDQLTGRNEELRQELRESRKEAINYSQQLAKANLKIDHLEKETSLLRQSEGSNVVFKGIDLPDGIAPSSASIINSQNEYLIHLLQELENKEKKLKNLEDSLEDYNRKFAVIRHQQSLLYKEYLSEKETWKTESKTIKEEKRKLEDQVQQDAIKVKEYNNLLNALQMDSDEMKKILAENSRKITVLQVNEKSLIRQYTTLVELERQLRKENEKQKNELLSMEAEVCEKIGCLQRFKEMAIFKIAALQKVVDNSVSLSELELANKQYNELTAKYRDILQKDNMLVQRTSNLEHLECENISLKEQVESINKELEITKEKLHTIEQAWEQETKLGNESSMDKAKKSITNSDIVSISKKITMLEMKELNERQRAEHCQKMYEHLRTSLKQMEERNFELETKFAELTKINLDAQKVEQMLRDELADSVSKAVSDADRQRILELEKNEMELKVEVSKLREISDIARRQVEILNAQQQSRDKEVESLRMQLLDYQAQSDEKSLIAKLHQHNVSLQLSEATALGKLESITSKLQKMEAYNLRLEQKLDEKEQALYYARLEGRNRAKHLRQTIQSLRRQFSGALPLAQQEKFSKTMIQLQNDKLKIMQEMKNSQQEHRNMENKTLEMELKLKGLEELISTLKDTKGAQKVINWHMKIEELRLQELKLNRELVKDKEEIKYLNNIISEYERTISSLEEEIVQQNKFHEERQMAWDQREVDLERQLDIFDRQQNEILNAAQKFEEATGSIPDPSLPLPNQLEIALRKIKENIRIILETRATCKSLEEKLKEKESALRLAEQNILSRDKVINELRLRLPATAEREKLIAELGRKEMEPKSHHTLKIAHQTIANMQARLNQKEEVLKKYQRLLEKAREEQREIVKKHEEDLHILHHRLELQADSSLNKFKQTAWDLMKQSPTPVPTNKHFIRLAEMEQTVAEQDDSLSSLLVKLKKVSQDLERQREITELKVKEFENIKLQLQENHEDEVKKVKAEVEDLKYLLDQSQKESQCLKSELQAQKEANSRAPTTTMRNLVERLKSQLALKEKQQKALSRALLELRAEMTAAAEERIISATSQKEAHLNVQQIVDRHTRELKTQVEDLNENLLKLKEALKTSKNRENSLTDNLNDLNNELQKKQKAYNKILREKEEIDQENDELKRQIKRLTSGLQGKPLTDNKQSLIEELQRKVKKLENQLEGKVEEVDLKPMKEKNAKEELIRWEEGKKWQAKIEGIRNKLKEKEGEVFTLTKQLNTLKDLFAKADKEKLTLQRKLKTTGMTVDQVLGIRALESEKELEELKKRNLDLENDILYMRAHQALPRDSVVEDLHLQNRYLQEKLHALEKQFSKDTYSKPSISGIESDDHCQREQELQKENLKLSSENIELKFQLEQANKDLPRLKNQVRDLKEMCEFLKKEKAEVQRKLGHVRGAELEKLKAHLGHQLSMHYESKTKGTEKIIAENERLRKELKKETDAAEKLRIAKNNLEILNEKMTVQLEETGKRLQFAESRGPQLEGADSKSWKSIVVTRMYETKLKELETDIAKKNQSITDLKQLVKEATEREQKVNKYNEDLEQQIKILKHVPEGAETEQGLKRELQVLRLANHQLDKEKAELIHQIEANKDQSGAESTIPDADQLKEKIKDLETQLKMSDLEKQHLKEEIKKLKKELENFDPSFFEEIEDLKYNYKEEVKKNILLEEKVKKLSEQLGVELTSPVAASEEFEDEEESPVNFPIY

SEQ ID NO: 70 - protein, 2612 aa, Homo sapiens
  CENTROSOMAL PROTEIN 290 (CEP290), ISOFORM X8 <Accession No.: XP_016875471.1>
MPPNINWKEIMKVDPDDLPRQEELADNLLISLSKVEVNELKSEKQENVIHLFRITQSLMKMKAQEVELALEEVEKAGEEQAKFENQLKTKVMKLENELEMAQQSAGGRDTRFLRNEICQLEKQLEQKDRELEDMEKELEKEKKVNEQLALRNEEAENENSKLRRENKRLKKKNEQLCQDIIDYQKQIDSQKETLLSRRGEDSDYRSQLSKKNYELIQYLDEIQTLTEANEKIEVQNQEMRKNLEESVQEMEKMTDEYNRMKAIVHQTDNVIDQLKKENDHYQLQVQELTDLLKSKNEEDDPIMVAVNAKVEEWKLILSSKDDEIIEYQQMLHNLREKLKNAQLDADKSNVMALQQGIQERDSQIKMLTEQVEQYTKEMEKNTCIIEDLKNELQRNKGASTLSQQTHMKIQSTLDILKEKTKEAERTAELAEADAREKDKELVEALKRLKDYESGVYGLEDAVVEIKNCKNQIKIRDREIEILTKEINKLELKISDFLDENEALRERVGLEPKTMIDLTEFRNSKHLKQQQYRAENQILLKEIESLEEERLDLKKKIRQMAQERGKRSATSGLTTEDLNLTENISQGDRISERKLDLLSLKNMSEAQSKIRSSDKAELLHRRSSFNTPQSDQNETEENMTIGSLSRMLSEIHHSVESGMHPFVPLTRLSSSMQVKENSTPETITIREIFKAPCLQSSRNLESLVSTFSRESHEEINDICLFSDDCMKKVSRSHQALEKTSFVQKSNSSFHGLSTASDIMQKLSLRQKSAIFCQQIHENRADMDKSQVATLEEEQVHSQVKYADINLKEDIIKSEVPLQTEILKNKLKVNLPDPVSITAQSKLSQINSLENLIEQLRRELVFLRSQNEIIAQEFLIKEAECRNADIELEHHRSQAEQNEFLSRELIEKERDLERSRTVIAKFQNKLKELVEENKQLEEGMKEILQAIKEMQKDPDVKGGETSLIIPSLERLVNAIESKNAEGIFDASLHLKAQVDQLTGRNEELRQELRESRKEAINYSQQLAKANLKIDHLEKETSLLRQSEGSNVVFKGIDLPDGIAPSSASIINSQNEYLIHLLQELENKEKKLKNLEDSLEDYNRKFAVIRHQQSLLYKEYLSEKETWKTESKTIKEEKRKLEDQVQQDAIKVKEYNNLLNALQMDSDEMKKILAENSRKITVLQVNEKSLIRQYTTLVELERQLRKENEKQKNELLSMEAEVCEKIGCLQRFKEMAIFKIAALQKVVDNSVSLSELELANKQYNELTAKYRDILQKDNMLVQRTSNLEHLECENISLKEQVESINKELEITKEKLHTIEQAWEQETKLGNESSMDKAKKSITNSDIVSISKKITMLEMKELNERQRAEHCQKMYEHLRTSLKQMEERNFELETKFAELTKINLDAQKVEQMLRDELADSVSKAVSDADRQRILELEKNEMELKVEVSKLREISDIARRQVEILNAQQQSRDKEVESLRMQLLDYQAQSDEKSLIAKLHQHNVSLQLSEATALGKLESITSKLQKMEAYNLRLEQKLDEKEQALYYARLEGRNRAKHLRQTIQSLRRQFSGALPLAQQEKFSKTMIQLQNDKLKIMQEMKNSQQEHRNMENKTLEMELKLKGLEELISTLKDTKGAQKVINWHMKIEELRLQELKLNRELVKDKEEIKYLNNIISEYERTISSLEEEIVQQNKFHEERQMAWDQREVDLERQLDIFDRQQNEILNAAQKFEEATGSIPDPSLPLPNQLEIALRKIKENIRIILETRATCKSLEEKLKEKESALRLAEQNILSRDKVINELRLRLPATAEREKLIAELGRKEMEPKSHHTLKIAHQTIANMQARLNQKEEVLKKYQRLLEKAREEQREIVKKHEEDLHILHHRLELQADSSLNKFKQTAWDLMKQSPTPVPTNKHFIRLAEMEQTVAEQDDSLSSLLVKLKKVSQDLERQREITELKVKEFENIKLQLQENHEDEVKKVKAEVEDLKYLLDQSQKESQCLKSELQAQKEANSRAPTTTMRNLVERLKSQLALKEKQQKALSRALLELRAEMTAAAEERIISATSQKEAHLNVQQIVDRHTRELKTQVEDLNENLLKLKEALKTSKNRENSLTDNLNDLNNELQKKQKAYNKILREKEEIDQENDELKRQIKRLTSGLQGKPLTDNKQSLIEELQRKVKKLENQLEGKVEEVDLKPMKEKNAKEELIRWEEGKKWQAKIEGIRNKLKEKEGEVFTLTKQLNTLKDLFAKADKEKLTLQRKLKTTGMTVDQVLGIRALESEKELEELKKRNLDLENDILYMRAHQALPRDSVVEDLHLQNRYLQEKLHALEKQFSKDTYSKPSQNQISGIESDDHCQREQELQKENLKLSSENIELKFQLEQANKDLPRLKNQVRDLKEMCEFLKKEKAEVQRKLGHVRGSGRSGKTIPELEKTIGLMKKVVEKVQRENEQLKKASGILTSEKMANIEQENEKLKAELEKLKAHLGHQLSMHYESKTKGTEKIIAENERLRKELKKETDAAEKLRIAKNNLEILNEKMTVQLEETGKRLQFAESRGPQLEGADSKSWKSIVVTRMYETKLKELETDIAKKNQSITDLKQLVKEATEREQKVNKYNEDLEQQIS

SEQ ID NO: 71 - protein, 2513 aa, Homo sapiens
  CENTROSOMAL PROTEIN 290 (CEP290), ISOFORM X9 <Accession No.: XP_011537064.1>
MPPNINWKEIMKVDPDDLPRQEELADNLLISLSKVEVNELKSEKQENVIHLFRITQSLMKMKAQEVELALEEVEKAGEEQAKFENQLKTKVMKLENELEMAQQSAGGRDTRFLRNEICQLEKQLEQKDRELEDMEKELEKEKKVNEQLALRNEEAENENSKLRRENKRLKKKNEQLCQDIIDYQKQIDSQKETLLSRRGEDSDYRSQLSKKNYELIQYLDEIQTLTEANEKIEVQNQEMRKNLEESVQEMEKMTDEYNRMKAIVHQTDNVIDQLKKENDHYQLQVQELTDLLKSKNEEDDPIMVAVNAKVEEWKLILSSKDDEIIEYQQMLHNLREKLKNAQLDADKSNVMALQQGIQERDSQIKMLTEQVEQYTKEMEKNTCIIEDLKNELQRNKGASTLSQQTHMKIQSTLDILKEKTKEAERTAELAEADAREKDKELVEALKRLKDYESGVYGLEDAVVEIKNCKNQIKIRDREIEILTKEINKLELKISDFLDENEALRERVGLEPKTMIDLTEFRNSKHLKQQQYRAENQILLKEIESLEEERLDLKKKIRQMAQERGKRSATSGLTTEDLNLTENISQGDRISERKLDLLSLKNMSEAQSKNEIIAQEFLIKEAECRNADIELEHHRSQAEQNEFLSRELIEKERDLERSRTVIAKFQNKLKELVEENKQLEEGMKEILQAIKEMQKDPDVKGGETSLIIPSLERLVNAIESKNAEGIFDASLHLKAQVDQLTGRNEELRQELRESRKEAINYSQQLAKANLKIDHLEKETSLLRQSEGSNVVFKGIDLPDGIAPSSASIINSQNEYLIHLLQELENKEKKLKNLEDSLEDYNRKFAVIRHQQSLLYKEYLSEKETWKTESKTIKEEKRKLEDQVQQDAIKVKEYNNLLNALQMDSDEMKKILAENSRKITVLQVNEKSLIRQYTTLVELERQLRKENEKQKNELLSMEAEVCEKIGCLQRFKEMAIFKIAALQKVVDNSVSLSELELANKQYNELTAKYRDILQKDNMLVQRTSNLEHLECENISLKEQVESINKELEITKEKLHTIEQAWEQETKLGNESSMDKAKKSITNSDIVSISKKITMLEMKELNERQRAEHCQKMYEHLRTSLKQMEERNFELETKFAELTKINLDAQKVEQMLRDELADSVSKAVSDADRQRILELEKNEMELKVEVSKLREISDIARRQVEILNAQQQSRDKEVESLRMQLLDYQAQSDEKSLIAKLHQHNVSLQLSEATALGKLESITSKLQKMEAYNLRLEQKLDEKEQALYYARLEGRNRAKHLRQTIQSLRRQFSGALPLAQQEKFSKTMIQLQNDKLKIMQEMKNSQQEHRNMENKTLEMELKLKGLEELISTLKDTKGAQKVINWHMKIEELRLQELKLNRELVKDKEEIKYLNNIISEYERTISSLEEEIVQQNKFHEERQMAWDQREVDLERQLDIFDRQQNEILNAAQKFEEATGSIPDPSLPLPNQLEIALRKIKENIRIILETRATCKSLEEKLKEKESALRLAEQNILSRDKVINELRLRLPATAEREKLIAELGRKEMEPKSHHTLKIAHQTIANMQARLNQKEEVLKKYQRLLEKAREEQREIVKKHEEDLHILHHRLELQADSSLNKFKQTAWDLMKQSPTPVPTNKHFIRLAEMEQTVAEQDDSLSSLLVKLKKVSQDLERQREITELKVKEFENIKLQLQENHEDEVKKVKAEVEDLKYLLDQSQKESQCLKSELQAQKEANSRAPTTTMRNLVERLKSQLALKEKQQKALSRALLELRAEMTAAAEERIISATSQKEAHLNVQQIVDRHTRELKTQVEDLNENLLKLKEALKTSKNRENSLTDNLNDLNNELQKKQKAYNKILREKEEIDQENDELKRQIKRLTSGLQGKPLTDNKQSLIEELQRKVKKLENQLEGKVEEVDLKPMKEKNAKEELIRWEEGKKWQAKIEGIRNKLKEKEGEVFTLTKQLNTLKDLFAKADKEKLTLQRKLKTTGMTVDQVLGIRALESEKELEELKKRNLDLENDILYMRAHQALPRDSVVEDLHLQNRYLQEKLHALEKQFSKDTYSKPSQNQISGIESDDHCQREQELQKENLKLSSENIELKFQLEQANKDLPRLKNQVRDLKEMCEFLKKEKAEVQRKLGHVRGSGRSGKTIPELEKTIGLMKKVVEKVQRENEQLKKASGILTSEKMANIEQENEKLKAELEKLKAHLGHQLSMHYESKTKGTEKIIAENERLRKELKKETDAAEKLRIAKNNLEILNEKMTVQLEETGKRLQFAESRGPQLEGADSKSWKSIVVTRMYETKLKELETDIAKKNQSITDLKQLVKEATEREQKVNKYNEDLEQQIKILKHVPEGAETEQGLKRELQVLRLANHQLDKEKAELIHQIEANKDQSGAESTIPDADQLKEKIKDLETQLKMSDLEKQHLKEEIKKLKKELENFDPSFFEEIEDLKYNYKEEVKKNILLEEKVKKLSEQLGVELTSPVAASEEFEDEEESPVNFPIY

SEQ ID NO: 72 - protein, 2482 aa, Homo sapiens
  CENTROSOMAL PROTEIN 290 (CEP290), ISOFORM X10 <Accession No.: XP_011537065.1>
MPPNINWKEIMKVDPDDLPRQEELADNLLISLSKVEVNELKSEKQENVIHLFRITQSLMKMKAQEVELALEEVEKAGEEQAKFENQLKTKVMKLENELEMAQQSAGGRDTRFLRNEICQLEKQLEQKDRELEDMEKELEKEKKVNEQLALRNEEAENENSKLRRENKRLKKKNEQLCQDIIDYQKQIDSQKETLLSRRGEDSDYRSQLSKKNYELIQYLDEIQTLTEANEKIEVQNQEMRKNLEESVQEMEKMTDEYNRMKAIVHQTDNVIDQLKKENDHYQLQVQELTDLLKSKNEEDDPIMVAVNAKVEEWKLILSSKDDEIIEYQQMLHNLREKLKNAQLDADKSNVMALQQGIQERDSQIKMLTEQVEQYTKEMEKNTCIIEDLKNELQRNKGASTLSQQTHMKIQSTLDILKEKTKEAERTAELAEADAREKDKELVEALKRLKDYESGVYGLEDAVVEIKNCKNQIKIRDREIEILTKEINKLELKISDFLDENEALRERVGLEPKTMIDLTEFRNSKHLKQQQYRAENQILLKEIESLEEERLDLKKKIRQMAQERGKRSATSGLTTEDLNLTENISQGDRISERKLDLLSLKNMSEAQSKNEFLSRELIEKERDLERSRTVIAKFQNKLKELVEENKQLEEGMKEILQAIKEMQKDPDVKGGETSLIIPSLERLVNAIESKNAEGIFDASLHLKAQVDQLTGRNEELRQELRESRKEAINYSQQLAKANLKIDHLEKETSLLRQSEGSNVVFKGIDLPDGIAPSSASIINSQNEYLIHLLQELENKEKKLKNLEDSLEDYNRKFAVIRHQQSLLYKEYLSEKETWKTESKTIKEEKRKLEDQVQQDAIKVKEYNNLLNALQMDSDEMKKILAENSRKITVLQVNEKSLIRQYTTLVELERQLRKENEKQKNELLSMEAEVCEKIGCLQRFKEMAIFKIAALQKVVDNSVSLSELELANKQYNELTAKYRDILQKDNMLVQRTSNLEHLECENISLKEQVESINKELEITKEKLHTIEQAWEQETKLGNESSMDKAKKSITNSDIVSISKKITMLEMKELNERQRAEHCQKMYEHLRTSLKQMEERNFELETKFAELTKINLDAQKVEQMLRDELADSVSKAVSDADRQRILELEKNEMELKVEVSKLREISDIARRQVEILNAQQQSRDKEVESLRMQLLDYQAQSDEKSLIAKLHQHNVSLQLSEATALGKLESITSKLQKMEAYNLRLEQKLDEKEQALYYARLEGRNRAKHLRQTIQSLRRQFSGALPLAQQEKFSKTMIQLQNDKLKIMQEMKNSQQEHRNMENKTLEMELKLKGLEELISTLKDTKGAQKVINWHMKIEELRLQELKLNRELVKDKEEIKYLNNIISEYERTISSLEEEIVQQNKFHEERQMAWDQREVDLERQLDIFDRQQNEILNAAQKFEEATGSIPDPSLPLPNQLEIALRKIKENIRIILETRATCKSLEEKLKEKESALRLAEQNILSRDKVINELRLRLPATAEREKLIAELGRKEMEPKSHHTLKIAHQTIANMQARLNQKEEVLKKYQRLLEKAREEQREIVKKHEEDLHILHHRLELQADSSLNKFKQTAWDLMKQSPTPVPTNKHFIRLAEMEQTVAEQDDSLSSLLVKLKKVSQDLERQREITELKVKEFENIKLQLQENHEDEVKKVKAEVEDLKYLLDQSQKESQCLKSELQAQKEANSRAPTTTMRNLVERLKSQLALKEKQQKALSRALLELRAEMTAAAEERIISATSQKEAHLNVQQIVDRHTRELKTQVEDLNENLLKLKEALKTSKNRENSLTDNLNDLNNELQKKQKAYNKILREKEEIDQENDELKRQIKRLTSGLQGKPLTDNKQSLIEELQRKVKKLENQLEGKVEEVDLKPMKEKNAKEELIRWEEGKKWQAKIEGIRNKLKEKEGEVFTLTKQLNTLKDLFAKADKEKLTLQRKLKTTGMTVDQVLGIRALESEKELEELKKRNLDLENDILYMRAHQALPRDSVVEDLHLQNRYLQEKLHALEKQFSKDTYSKPSQNQISGIESDDHCQREQELQKENLKLSSENIELKFQLEQANKDLPRLKNQVRDLKEMCEFLKKEKAEVQRKLGHVRGSGRSGKTIPELEKTIGLMKKVVEKVQRENEQLKKASGILTSEKMANIEQENEKLKAELEKLKAHLGHQLSMHYESKTKGTEKIIAENERLRKELKKETDAAEKLRIAKNNLEILNEKMTVQLEETGKRLQFAESRGPQLEGADSKSWKSIVVTRMYETKLKELETDIAKKNQSITDLKQLVKEATEREQKVNKYNEDLEQQIKILKHVPEGAETEQGLKRELQVLRLANHQLDKEKAELIHQIEANKDQSGAESTIPDADQLKEKIKDLETQLKMSDLEKQHLKEEIKKLKKELENFDPSFFEEIEDLKYNYKEEVKKNILLEEKVKKLSEQLGVELTSPVAASEEFEDEEESPVNFPIY

SEQ ID NO: 73 - protein, 2475 aa, Homo sapiens
  CENTROSOMAL PROTEIN 290 (CEP290), ISOFORM X11 <Accession No.: XP_016875472.1>
MPPNINWKEIMKVDPDDLPRQEELADNLLISLSKVEVNELKSEKQENVIHLFRITQSLMKMKAQEVELALEEVEKAGEEQAKFENQLKTKVMKLENELEMAQQSAGGRDTRFLRNEICQLEKQLEQKDRELEDMEKELEKEKKVNEQLALRNEEAENENSKLRRENEQLCQDIIDYQKQIDSQKETLLSRRGEDSDYRSQLSKKNYELIQYLDEIQTLTEANEKIEVQNQEMRKNLEESVQEMEKMTDEYNRMKAIVHQTDNVIDQLKKENDHYQLQVQELTDLLKSKNEEDDPIMVAVNAKVEEWKLILSSKDDEIIEYQQMLHNLREKLKNAQLDADKSNVMALQQGIQERDSQIKMLTEQVEQYTKEMEKNTCIIEDLKNELQRNKGASTLSQQTHMKIQSTLDILKEKTKEAERTAELAEADAREKDKELVEALKRLKDYESGVYGLEDAVVEIKNCKNQIKIRDREIEILTKEINKLELKISDFLDENEALRERVGLEPKTMIDLTEFRNSKHLKQQQYRAENQILLKEIESLEEERLDLKKKIRQMAQERGKRSATSGLTTEDLNLTENISQGDRISERKLDLLSLKNMSEAQSKNEFLSRELIEKERDLERSRTVIAKFQNKLKELVEENKQLEEGMKEILQAIKEMQKDPDVKGGETSLIIPSLERLVNAIESKNAEGIFDASLHLKAQVDQLTGRNEELRQELRESRKEAINYSQQLAKANLKIDHLEKETSLLRQSEGSNVVFKGIDLPDGIAPSSASIINSQNEYLIHLLQELENKEKKLKNLEDSLEDYNRKFAVIRHQQSLLYKEYLSEKETWKTESKTIKEEKRKLEDQVQQDAIKVKEYNNLLNALQMDSDEMKKILAENSRKITVLQVNEKSLIRQYTTLVELERQLRKENEKQKNELLSMEAEVCEKIGCLQRFKEMAIFKIAALQKVVDNSVSLSELELANKQYNELTAKYRDILQKDNMLVQRTSNLEHLECENISLKEQVESINKELEITKEKLHTIEQAWEQETKLGNESSMDKAKKSITNSDIVSISKKITMLEMKELNERQRAEHCQKMYEHLRTSLKQMEERNFELETKFAELTKINLDAQKVEQMLRDELADSVSKAVSDADRQRILELEKNEMELKVEVSKLREISDIARRQVEILNAQQQSRDKEVESLRMQLLDYQAQSDEKSLIAKLHQHNVSLQLSEATALGKLESITSKLQKMEAYNLRLEQKLDEKEQALYYARLEGRNRAKHLRQTIQSLRRQFSGALPLAQQEKFSKTMIQLQNDKLKIMQEMKNSQQEHRNMENKTLEMELKLKGLEELISTLKDTKGAQKVINWHMKIEELRLQELKLNRELVKDKEEIKYLNNIISEYERTISSLEEEIVQQNKFHEERQMAWDQREVDLERQLDIFDRQQNEILNAAQKFEEATGSIPDPSLPLPNQLEIALRKIKENIRIILETRATCKSLEEKLKEKESALRLAEQNILSRDKVINELRLRLPATAEREKLIAELGRKEMEPKSHHTLKIAHQTIANMQARLNQKEEVLKKYQRLLEKAREEQREIVKKHEEDLHILHHRLELQADSSLNKFKQTAWDLMKQSPTPVPTNKHFIRLAEMEQTVAEQDDSLSSLLVKLKKVSQDLERQREITELKVKEFENIKLQLQENHEDEVKKVKAEVEDLKYLLDQSQKESQCLKSELQAQKEANSRAPTTTMRNLVERLKSQLALKEKQQKALSRALLELRAEMTAAAEERIISATSQKEAHLNVQQIVDRHTRELKTQVEDLNENLLKLKEALKTSKNRENSLTDNLNDLNNELQKKQKAYNKILREKEEIDQENDELKRQIKRLTSGLQGKPLTDNKQSLIEELQRKVKKLENQLEGKVEEVDLKPMKEKNAKEELIRWEEGKKWQAKIEGIRNKLKEKEGEVFTLTKQLNTLKDLFAKADKEKLTLQRKLKTTGMTVDQVLGIRALESEKELEELKKRNLDLENDILYMRAHQALPRDSVVEDLHLQNRYLQEKLHALEKQFSKDTYSKPSQNQISGIESDDHCQREQELQKENLKLSSENIELKFQLEQANKDLPRLKNQVRDLKEMCEFLKKEKAEVQRKLGHVRGSGRSGKTIPELEKTIGLMKKVVEKVQRENEQLKKASGILTSEKMANIEQENEKLKAELEKLKAHLGHQLSMHYESKTKGTEKIIAENERLRKELKKETDAAEKLRIAKNNLEILNEKMTVQLEETGKRLQFAESRGPQLEGADSKSWKSIVVTRMYETKLKELETDIAKKNQSITDLKQLVKEATEREQKVNKYNEDLEQQIKILKHVPEGAETEQGLKRELQVLRLANHQLDKEKAELIHQIEANKDQSGAESTIPDADQLKEKIKDLETQLKMSDLEKQHLKEEIKKLKKELENFDPSFFEEIEDLKYNYKEEVKKNILLEEKVKKLSEQLGVELTSPVAASEEFEDEEESPVNFPIY

SEQ ID NO: 74 - protein, 2366 aa, Homo sapiens
  CENTROSOMAL PROTEIN 290 (CEP290), ISOFORM X12 <Accession No.: XP_011537066.1>
MPPNINWKEIMKVDPDDLPRQEELADNLLISLSKVEVNELKSEKQENVIHLFRITQSLMKMKAQEVELALEEVEKAGEEQAKFENQLKTKVMKLENELEMAQQSAGGRDTRFLRNEICQLEKQLEQKDRELEDMEKELEKEKKVNEQLALRNEEAENENSKLRRENKRLKKKNEQLCQDIIDYQKQIDSQKETLLSRRGEDSDYRSQLSKKNYELIQYLDEIQTLTEANEKIEVQNQEMRKNLEESVQEMEKMTDEYNRMKAIVHQTDNVIDQLKKENDHYQLQVQELTDLLKSKNEEDDPIMVAVNAKVEEWKLILSSKDDEIIEYQQMLHNLREKLKNAQLDADKSNVMALQQGIQERDSQIKMLTEQVEQYTKEMEKNTCIIEDLKNELQRNKGASTLSQQTHMKIQSTLDILKEKTKEAERTAELAEADAREKDKELVEALKRLKDYESGVYGLEDAVVEIKNCKNQIKIRDREIEILTKEINKLELKISDFLDENEALRERVGLEPKTMIDLTEFRNSKHLKQQQYRAENQILLKEIESLEEERLDLKKKIRQMAQERGKRSATSGLTTEDLNLTENISQGDRISERKLDLLSLKNMSEAQSKIRSSDKAELLHRRSSFNTPQSDQNETEENMTIGSLSRMLSEIHHSVESGMHPFVPLTRLSSSMQVKENSTPETITIREIFKAPCLQSSRNLESLVSTFSRESHEEINDICLFSDDCMKKVSRSHQALEKTSFVQKSNSSFHGLSTASDIMQKLSLRQKSAIFCQQIHENRADMDKSQVATLEEEQVHSQVKYADINLKEDIIKSEVPLQTEILKNKLKVNLPDPVSITAQSKLSQINSLENLIEQLRRELVFLRSQNEIIAQEFLIKEAECRNADIELEHHRSQAEQNEFLSRELIEKERDLERSRTVIAKFQNKLKELVEENKQLEEGMKEILQAIKEMQKDPDVKGGETSLIIPSLERLVNAIESKNAEGIFDASLHLKAQVDQLTGRNEELRQELRESRKEAINYSQQLAKANLKIDHLEKETSLLRQSEGSNVVFKGIDLPDGIAPSSASIINSQNEYLIHLLQELENKEKKLKNLEDSLEDYNRKFAVIRHQQSLLYKEYLSEKETWKTESKTIKEEKRKLEDQVQQDAIKVKEYNNLLNALQMDSDEMKKILAENSRKITVLQVNEKSLIRQYTTLVELERQLRKENEKQKNELLSMEAEVCEKIGCLQRFKEMAIFKIAALQKVVDNSVSLSELELANKQYNELTAKYRDILQKDNMLVQRTSNLEHLECENISLKEQVESINKELEITKEKLHTIEQAWEQETKLGNESSMDKAKKSITNSDIVSISKKITMLEMKELNERQRAEHCQKMYEHLRTSLKQMEERNFELETKFAELTKINLDAQKVEQMLRDELADSVSKAVSDADRQRILELEKNEMELKVEVSKLREISDIARRQVEILNAQQQSRDKEVESLRMQLLDYQAQSDEKSLIAKLHQHNVSLQLSEATALGKLESITSKLQKMEAYNLRLEQKLDEKEQALYYARLEGRNRAKHLRQTIQSLRRQFSGALPLAQQEKFSKTMIQLQNDKLKIMQEMKNSQQEHRNMENKTLEMELKLKGLEELISTLKDTKGAQKVINWHMKIEELRLQELKLNRELVKDKEEIKYLNNIISEYERTISSLEEEIVQQNKFHEERQMAWDQREVDLERQLDIFDRQQNEILNAAQKFEEATGSIPDPSLPLPNQLEIALRKIKENIRIILETRATCKSLEEKLKEKESALRLAEQNILSRDKVINELRLRLPATAEREKLIAELGRKEMEPKSHHTLKIAHQTIANMQARLNQKEEVLKKYQRLLEKAREEQREIVKKHEEDLHILHHRLELQADSSLNKFKQTAWDLMKQSPTPVPTNKHFIRLAEMEQTVAEQDDSLSSLLVKLKKVSQDLERQREITELKVKEFENIKLQLQENHEDEVKKVKAEVEDLKYLLDQSQKESQCLKSELQAQKEANSRAPTTTMRNLVERLKSQLALKEKQQKALSRALLELRAEMTAAAEERIISATSQKEAHLNVQQIVDRHTRELKTQVEDLNENLLKLKEALKTSKNRENSLTDNLNDLNNELQKKQKAYNKILREKEEIDQENDELKRQIKRLTSGLQGKPLTDNKQSLIEELQRKVKKLENQLEGKVEEVDLKPMKEKNAKEELIRWEEGKKWQAKIEGIRNKLKEKEGEVFTLTKQLNTLKDLFAKADKEKLTLQRKLKTTGMTVDQVLGIRALESEKELEELKKRNLDLENDILYMRAHQALPRDSVVEDLHLQNRYLQEKLHALEKQFSKDTYSKPSQNQDTSHSRIGFTLKSHFNLNTSVKTQSPNKVTF

SEQ ID NO: 75 - protein, 2365 aa, Homo sapiens
  CENTROSOMAL PROTEIN 290 (CEP290), ISOFORM X13 <Accession No.: XP_011537067.1>
MPPNINWKEIMKVDPDDLPRQEELADNLLISLSKVEVNELKSEKQENVIHLFRITQSLMKMKAQEVELALEEVEKAGEEQAKFENQLKTKVMKLENELEMAQQSAGGRDTRFLRNEICQLEKQLEQKDRELEDMEKELEKEKKVNEQLALRNEEAENENSKLRRENKRLKKKNEQLCQDIIDYQKQIDSQKETLLSRRGEDSDYRSQLSKKNYELIQYLDEIQTLTEANEKIEVQNQEMRKNLEESVQEMEKMTDEYNRMKAIVHQTDNVIDQLKKENDHYQLQVQELTDLLKSKNEEDDPIMVAVNAKVEEWKLILSSKDDEIIEYQQMLHNLREKLKNAQLDADKSNVMALQQGIQERDSQIKMLTEQVEQYTKEMEKNTCIIEDLKNELQRNKGASTLSQQTHMKIQSTLDILKEKTKEAERTAELAEADAREKDKELVEALKRLKDYESGVYGLEDAVVEIKNCKNQIKIRDREIEILTKEINKLELKISDFLDENEALRERVGLEPKTMIDLTEFRNSKHLKQQQYRAENQILLKEIESLEEERLDLKKKIRQMAQERGKRSATSGLTTEDLNLTENISQGDRISERKLDLLSLKNMSEAQSKIRSSDKAELLHRRSSFNTPQSDQNETEENMTIGSLSRMLSEIHHSVESGMHPFVPLTRLSSSMQVKENSTPETITIREIFKAPCLQSSRNLESLVSTFSRESHEEINDICLFSDDCMKKVSRSHQALEKTSFVQKSNSSFHGLSTASDIMQKLSLRQKSAIFCQQIHENRADMDKSQVATLEEEQVHSQVKYADINLKEDIIKSEVPLQTEILKNKLKVNLPDPVSITAQSKLSQINSLENLIEQLRRELVFLRSQNEIIAQEFLIKEAECRNADIELEHHRSQAEQNEFLSRELIEKERDLERSRTVIAKFQNKLKELVEENKQLEEGMKEILQAIKEMQKDPDVKGGETSLIIPSLERLVNAIESKNAEGIFDASLHLKAQVDQLTGRNEELRQELRESRKEAINYSQQLAKANLKIDHLEKETSLLRQSEGSNVVFKGIDLPDGIAPSSASIINSQNEYLIHLLQELENKEKKLKNLEDSLEDYNRKFAVIRHQQSLLYKEYLSEKETWKTESKTIKEEKRKLEDQVQQDAIKVKEYNNLLNALQMDSDEMKKILAENSRKITVLQVNEKSLIRQYTTLVELERQLRKENEKQKNELLSMEAEVCEKIGCLQRFKEMAIFKIAALQKVVDNSVSLSELELANKQYNELTAKYRDILQKDNMLVQRTSNLEHLECENISLKEQVESINKELEITKEKLHTIEQAWEQETKLGNESSMDKAKKSITNSDIVSISKKITMLEMKELNERQRAEHCQKMYEHLRTSLKQMEERNFELETKFAELTKINLDAQKVEQMLRDELADSVSKAVSDADRQRILELEKNEMELKVEVSKLREISDIARRQVEILNAQQQSRDKEVESLRMQLLDYQAQSDEKSLIAKLHQHNVSLQLSEATALGKLESITSKLQKMEAYNLRLEQKLDEKEQALYYARLEGRNRAKHLRQTIQSLRRQFSGALPLAQQEKFSKTMIQLQNDKLKIMQEMKNSQQEHRNMENKTLEMELKLKGLEELISTLKDTKGAQKVINWHMKIEELRLQELKLNRELVKDKEEIKYLNNIISEYERTISSLEEEIVQQNKFHEERQMAWDQREVDLERQLDIFDRQQNEILNAAQKFEEATGSIPDPSLPLPNQLEIALRKIKENIRIILETRATCKSLEEKLKEKESALRLAEQNILSRDKVINELRLRLPATAEREKLIAELGRKEMEPKSHHTLKIAHQTIANMQARLNQKEEVLKKYQRLLEKAREEQREIVKKHEEDLHILHHRLELQADSSLNKFKQTAWDLMKQSPTPVPTNKHFIRLAEMEQTVAEQDDSLSSLLVKLKKVSQDLERQREITELKVKEFENIKLQLQENHEDEVKKVKAEVEDLKYLLDQSQKESQCLKSELQAQKEANSRAPTTTMRNLVERLKSQLALKEKQQKALSRALLELRAEMTAAAEERIISATSQKEAHLNVQQIVDRHTRELKTQVEDLNENLLKLKEALKTSKNRENSLTDNLNDLNNELQKKQKAYNKILREKEEIDQENDELKRQIKRLTSGLQGKPLTDNKQSLIEELQRKVKKLENQLEGKVEEVDLKPMKEKNAKEELIRWEEGKKWQAKIEGIRNKLKEKEGEVFTLTKQLNTLKDLFAKADKEKLTLQRKLKTTGMTVDQVLGIRALESEKELEELKKRNLDLENDILYMRAHQALPRDSVVEDLHLQNRYLQEKLHALEKQFSKDTYSKPSNQDTSHSRIGFTLKSHFNLNTSVKTQSPNKVTF

SEQ ID NO: 76 - protein, 2256 aa, Homo sapiens
  CENTROSOMAL PROTEIN 290 (CEP290), ISOFORM X14 <Accession No.: XP_011537068.1>
MIDLTEFRNSKHLKQQQYRAENQILLKEIESLEEERLDLKKKIRQMAQERGKRSATSGLTTEDLNLTENISQGDRISERKLDLLSLKNMSEAQSKIRSSDKAELLHRRSSFNTPQSDQNETEENMTIGSLSRMLSEIHHSVESGMHPFVPLTRLSSSMQVKENSTPETITIREIFKAPCLQSSRNLESLVSTFSRESHEEINDICLFSDDCMKKVSRSHQALEKTSFVQKSNSSFHGLSTASDIMQKLSLRQKSAIFCQQIHENRADMDKSQVATLEEEQVHSQVKYADINLKEDIIKSEVPLQTEILKNKLKVNLPDPVSITAQSKLSQINSLENLIEQLRRELVFLRSQNEIIAQEFLIKEAECRNADIELEHHRSQAEQNEFLSRELIEKERDLERSRTVIAKFQNKLKELVEENKQLEEGMKEILQAIKEMQKDPDVKGGETSLIIPSLERLVNAIESKNAEGIFDASLHLKAQVDQLTGRNEELRQELRESRKEAINYSQQLAKANLKIDHLEKETSLLRQSEGSNVVFKGIDLPDGIAPSSASIINSQNEYLIHLLQELENKEKKLKNLEDSLEDYNRKFAVIRHQQSLLYKEYLSEKETWKTESKTIKEEKRKLEDQVQQDAIKVKEYNNLLNALQMDSDEMKKILAENSRKITVLQVNEKSLIRQYTTLVELERQLRKENEKQKNELLSMEAEVCEKIGCLQRFKEMAIFKIAALQKVVDNSVSLSELELANKQYNELTAKYRDILQKDNMLVQRTSNLEHLECENISLKEQVESINKELEITKEKLHTIEQAWEQETKLGNESSMDKAKKSITNSDIVSISKKITMLEMKELNERQRAEHCQKMYEHLRTSLKQMEERNFELETKFAELTKINLDAQKVEQMLRDELADSVSKAVSDADRQRILELEKNEMELKVEVSKLREISDIARRQVEILNAQQQSRDKEVESLRMQLLDYQAQSDEKSLIAKLHQHNVSLQLSEATALGKLESITSKLQKMEAYNLRLEQKLDEKEQALYYARLEGRNRAKHLRQTIQSLRRQFSGALPLAQQEKFSKTMIQLQNDKLKIMQEMKNSQQEHRNMENKTLEMELKLKGLEELISTLKDTKGAQKVINWHMKIEELRLQELKLNRELVKDKEEIKYLNNIISEYERTISSLEEEIVQQNKFHEERQMAWDQREVDLERQLDIFDRQQNEILNAAQKFEEATGSIPDPSLPLPNQLEIALRKIKENIRIILETRATCKSLEEKLKEKESALRLAEQNILSRDKVINELRLRLPATAEREKLIAELGRKEMEPKSHHTLKIAHQTIANMQARLNQKEEVLKKYQRLLEKAREEQREIVKKHEEDLHILHHRLELQADSSLNKFKQTAWDLMKQSPTPVPTNKHFIRLAEMEQTVAEQDDSLSSLLVKLKKVSQDLERQREITELKVKEFENIKLQLQENHEDEVKKVKAEVEDLKYLLDQSQKESQCLKSELQAQKEANSRAPTTTMRNLVERLKSQLALKEKQQKALSRALLELRAEMTAAAEERIISATSQKEAHLNVQQIVDRHTRELKTQVEDLNENLLKLKEALKTSKNRENSLTDNLNDLNNELQKKQKAYNKILREKEEIDQENDELKRQIKRLTSGLQGKPLTDNKQSLIEELQRKVKKLENQLEGKVEEVDLKPMKEKNAKEELIRWEEGKKWQAKIEGIRNKLKEKEGEVFTLTKQLNTLKDLFAKADKEKLTLQRKLKTTGMTVDQVLGIRALESEKELEELKKRNLDLENDILYMRAHQALPRDSVVEDLHLQNRYLQEKLHALEKQFSKDTYSKPSQNQISGIESDDHCQREQELQKENLKLSSENIELKFQLEQANKDLPRLKNQVRDLKEMCEFLKKEKAEVQRKLGHVRGSGRSGKTIPELEKTIGLMKKVVEKVQRENEQLKKASGILTSEKMANIEQENEKLKAELEKLKAHLGHQLSMHYESKTKGTEKIIAENERLRKELKKETDAAEKLRIAKNNLEILNEKMTVQLEETGKRLQFAESRGPQLEGADSKSWKSIVVTRMYETKLKELETDIAKKNQSITDLKQLVKEATEREQKVNKYNEDLEQQIKILKHVPEGAETEQGLKRELQVLRLANHQLDKEKAELIHQIEANKDQSGAESTIPDADQLKEKIKDLETQLKMSDLEKQHLKEEIKKLKKELENFDPSFFEEIEDLKYNYKEEVKKNILLEEKVKKLSEQLGVELTSPVAASEEFEDEEESPVNFPIY

SEQ ID NO: 77 - protein, 599 aa, Homo sapiens
  INOSINE MONOPHOSPHATE DEHYDROGENASE 1 (IMPDH1) <Accession No.: EAL24310.1>
MEGPLTPPPLQGGGAAAVPEPGARQHPGHETAAQRYSARLLQAGYEPESPRLDLATHPTTPRSELSSVVLLAGVGVQMDRLRRASMADYLISGGTGYVPEDGLTAQQLFASADGLTYNDFLILPGFIDFIADEVDLTSALTRKITLKTPLISSPMDTVTEADMAIAMALMGGIGFIHHNCTPEFQANEVRKVKKFEQGFITDPVVLSPSHTVGDVLEAKMRHGFSGIPITETGTMGSKLVGIVTSRDIDFLAEKDHTTLLSEVMTPRIELVVAPAGVTLKEANEILQRSKKGKLPIVNDCDELVAIIARTDLKKNRDYPLASKDSQKQLLCGAAVGTREDDKYRLDLLTQAGVDVIVLDSSQGNSVYQIAMVHYIKQKYPHLQVIGGNVVTAAQAKNLIDAGVDGLRVGMGCGSICITQEVMACGRPQGTAVYKVAEYARRFGVPIIADGGIQTVGHVVKALALGASTVMMGSLLAATTEAPGEYFFSDGVRLKKYRGMGSLDAMEKSSSSQKRYFSEGDKVKIAQGVSGSIQDKGSIQKFVPYLIAGIQHGCQDIGARSLSVLRSMMYSGELKFEKRTMSAQIEGGVHGLHSYEKRLY

SEQ ID NO: 78 - protein, 563 aa, Homo sapiens
  INOSINE MONOPHOSPHATE DEHYDROGENASE 1 (IMPDH1) <Accession No.: AAH33622.2>
MEGPLTPPPLQGGGAAAVPEPGARQHPGHETAAQRYSARLLQAGYEPESMADYLISGGTGYVPEDGLTAQQLFASADGLTYNDFLILPGFIDFIADEVDLTSALTRKITLKTPLISSPMDTVTEADMAIAMALMGGIGFIHHNCTPEFQANEVRKVKKFEQGFITDPVVLSPSHTVGDVLEAKMRHGFSGIPITETGTMGSKLVGIVTSRDIDFLAEKDHTTLLSEVMTPRIELVVAPAGVTLKEANEILQRSKKGKLPIVNDCDELVAIIARTDLKKNRDYPLASKDSQKQLLCGAAVGTREDDKYRLDLLTQAGVDVIVLDSSQGNSVYQIAMVHYIKQKYPHLQVIGGNVVTAAQAKNLIDAGVDGLRVGMGCGSICITQEVMACGRPQGTAVYKVAEYARRFGVPIIADGGIQTVGHVVKALALGASTVMMGSLLAATTEAPGEYFFSDGVRLKKYRGMGSLDAMEKSSSSQKRYFSEGDKVKIAQGVSGSIQDKGSIQKFVPYLIAGIQHGCQDIGARSLSVLRSMMYSGELKFEKRTMSAQIEGGVHGLHSYEKRLY

SEQ ID NO: 79 - protein, 561 aa, Homo sapiens
  INOSINE MONOPHOSPHATE DEHYDROGENASE 1 (IMPDH1), ISOFORM CRA_A <Accession No.: EAW83649.1>
MEGPLTPPPLQGGGAAAVPEPGARQHPGHETAAQRYSARLLQAGYEPESMADYLISGGTGYVPEDGLTAQQLFASADGLTYNDFLILPGFIDFIADEVDLTSALTRKITLKTPLISSPMDTVTEADMAIAMALMGGIGFIHHNCTPEFQANEVRKKFEQGFITDPVVLSPSHTVGDVLEAKMRHGFSGIPITETGTMGSKLVGIVTSRDIDFLAEKDHTTLLSEVMTPRIELVVAPAGVTLKEANEILQRSKKGKLPIVNDCDELVAIIARTDLKKNRDYPLASKDSQKQLLCGAAVGTREDDKYRLDLLTQAGVDVIVLDSSQGNSVYQIAMVHYIKQKYPHLQVIGGNVVTAAQAKNLIDAGVDGLRVGMGCGSICITQEVMACGRPQGTAVYKVAEYARRFGVPIIADGGIQTVGHVVKALALGASTVMMGSLLAATTEAPGEYFFSDGVRLKKYRGMGSLDAMEKSSSSQKRYFSEGDKVKIAQGVSGSIQDKGSIQKFVPYLIAGIQHGCQDIGARSLSVLRSMMYSGELKFEKRTMSAQIEGGVHGLHSYEKRLY

SEQ ID NO: 80 - protein, 497 aa, Homo sapiens
  INOSINE MONOPHOSPHATE DEHYDROGENASE 1 (IMPDH1), ISOFORM CRA_B <Accession No.: EAW83650.1>
MDRLRRASMADYLISGGTGYVPEDGLTAQQLFASADGLTYNDFLILPGFIDFIADEVDLTSALTRKITLKTPLISSPMDTVTEADMAIAMAKFEQGFITDPVVLSPSHTVGDVLEAKMRHGFSGIPITETGTMGSKLVGIVTSRDIDFLAEKDHTTLLSEVMTPRIELVVAPAGVTLKEANEILQRSKKGKLPIVNDCDELVAIIARTDLKKNRDYPLASKDSQKQLLCGAAVGTREDDKYRLDLLTQAGVDVIVLDSSQGNSVYQIAMVHYIKQKYPHLQVIGGNVVTAAQAKNLIDAGVDGLRVGMGCGSICITQEVMACGRPQGTAVYKVAEYARRFGVPIIADGGIQTVGHVVKALALGASTVMMGSLLAATTEAPGEYFFSDGVRLKKYRGMGSLDAMEKSSSSQKRYFSEGDKVKIAQGVSGSIQDKGSIQKFVPYLIAGIQHGCQDIGARSLSVLRSMMYSGELKFEKRTMSAQIEGGVHGLHSYEKRLY

SEQ ID NO: 81 - protein, 380 aa, Homo sapiens
  INOSINE MONOPHOSPHATE DEHYDROGENASE 1 (IMPDH1), ISOFORM CRA_C <Accession No.: EAW83651.1>
MRHGFSGIPITETGTMGSKLVGIVTSRDIDFLAEKDHTTLLSEVMTPRIELVVAPAGVTLKEANEILQRSKKGKLPIVNDCDELVAIIARTDLKKNRDYPLASKDSQKQLLCGAAVGTREDDKYRLDLLTQAGVDVIVLDSSQGNSVYQIAMVHYIKQKYPHLQVIGGNVVTAAQAKNLIDAGVDGLRVGMGCGSICITQEVMACGRPQGTAVYKVAEYARRFGVPIIADGGIQTVGHVVKALALGASTVMMGSLLAATTEAPGEYFFSDGVRLKKYRGMGSLDAMEKSSSSQKRYFSEGDKVKIAQGVSGSIQDKGSIQKFVPYLIAGIQHGCQDIGARSLSVLRSMMYSGELKFEKRTMSAQIEGGVHGLHSYEKRLY

SEQ ID NO: 82 - protein, 522 aa, Homo sapiens
  INOSINE MONOPHOSPHATE DEHYDROGENASE 1 (IMPDH1), ISOFORM CRA_D <Accession No.: EAW83652.1>
MDRLRRASMADYLISGGTGYVPEDGLTAQQLFASADGLTYNDFLILPGFIDFIADEVDLTSALTRKITLKTPLISSPMDTVTEADMAIAMALMGGIGFIHHNCTPEFQANEVRKVKKFEQGFITDPVVLSPSHTVGDVLEAKMRHGFSGIPITETGTMGSKLVGIVTSRDIDFLAEKDHTTLLSEVMTPRIELVVAPAGVTLKEANEILQRSKKGKLPIVNDCDELVAIIARTDLKKNRDYPLASKDSQKQLLCGAAVGTREDDKYRLDLLTQAGVDVIVLDSSQGNSVYQIAMVHYIKQKYPHLQVIGGNVVTAAQAKNLIDAGVDGLRVGMGCGSICITQEVMACGRPQGTAVYKVAEYARRFGVPIIADGGIQTVGHVVKALALGASTVMMGSLLAATTEAPGEYFFSDGVRLKKYRGMGSLDAMEKSSSSQKRYFSEGDKVKIAQGVSGSIQDKGSIQKFVPYLIAGIQHGCQDIGARSLSVLRSMMYSGELKFEKRTMSAQIEGGVHGLHSYEKRLY

SEQ ID NO: 83 - protein, 195 aa, Homo sapiens
  RETINAL DEGENERATION 3, GUCY2D REGULATOR (RD3) <Accession No.: NP_001158160.1>
MSLISWLRWNEAPSRLSTRSPAEMVLETLMMELTGQMREAERQQRERSNAVRKVCTGVDYSWLASTPRSTYDLSPIERLQLEDVCVKIHPSYCGPAILRFRQLLAEQEPEVQEVSQLFRSVLQEVLERMKQEEEAHKLTRQWSLRPRGSLATFKTRARISPFASDIRTISEDVERDTPPPLRSWSMPEFRAPKAD

SEQ ID NO: 84 - protein, 316 aa, Homo sapiens
  RETINOL DEHYDROGENASE 12 (RDH12) <Accession No.: Q96NR8.3>
MLVTLGLLTSFFSFLYMVAPSIRKFFAGGVCRTNVQLPGKVVVITGANTGIGKETARELASRGARVYIACRDVLKGESAASEIRVDTKNSQVLVRKLDLSDTKSIRAFAEGFLAEEKQLHILINNAGVMMCPYSKTADGFETHLGVNHLGHFLLTYLLLERLKVSAPARVVNVSSVAHHIGKIPFHDLQSEKRYSRGFAYCHSKLANVLFTRELAKRLQGTGVTTYAVHPGVVRSELVRHSSLLCLLWRLFSPFVKTAREGAQTSLHCALAEGLEPLSGKYFSDCKRTWVSPRARNNKTAERLWNVSCELLGIRWE

SEQ ID NO: 85 - protein, 316 aa, Homo sapiens; identical to SEQ ID NO: 84
  RETINOL DEHYDROGENASE 12 (RDH12), ISOFORM 1, PARTIAL <Accession No.: ALQ34323.1>

SEQ ID NO: 86 - protein, 246 aa, Homo sapiens
  RETINOL DEHYDROGENASE 12 (RDH12), ISOFORM 4, PARTIAL <Accession No.: ALQ34324.1>
MLVTLGLLTSFFSFLYMVAPSIRKFFAGGVCRTNVQLPGKVVVITGANTGIGKETARELASRGARVYIACRDVLKGESAASEIRVDTKNSQVLVRKLDLSDTKSIRAFAEGFLAEEKQLHILINNAGVMMCPYSKTADGFETHLGVNHLGTGVTTYAVHPGVVRSELVRHSSLLCLLWRLFSPFVKTAREGAQTSLHCALAEGLEPLSGKYFSDCKRTWVSPRARNNKTAERLWNVSCELLGIRWE

SEQ ID NO: 87 - protein, 316 aa, Homo sapiens; identical to SEQ ID NO: 84
  RETINOL DEHYDROGENASE 12 (RDH12), PRECURSOR <Accession No.: NP_689656.2>

SEQ ID NO: 88 - protein, 230 aa, Homo sapiens
  LECITHIN RETINOL ACYLTRANSFERASE (LRAT) <Accession No.: AAD13529.1>
MKNPMLEVVSLLLEKLLLISNFTLFSSGAAGKDKGRNSFYETSSFHRGDVLEVPRTHLTHYGIYLGDNRVAHMMPDILLALTDDMGRTQKVVSNKRLILGVIVKVASIRVDTVEDFAYGANILVNHLDESLQKKALLNEEVARRAEKLLGFTPYSLLWNNCEHFVTYCRYGTPISPQSDKFCETVKIIIRDQRSVLASAVLGLASIVCTGLVSYTTLPAIFIPFFLWMAG

SEQ ID NO: 89 - protein, 542 aa, Homo sapiens
  TUBBY LIKE PROTEIN 1 (TULP1) <Accession No.: AAB97966.1>
MPLRDETLREVWASDSGHEEESLSPEAPRRPKQRPAPAQRLRKKRTEAPESPCPTGSKPRKPGAGRRGRPREEPSPDPAQARAPQTVYARFLRDPEAKKRDPRETFLVARAPDAEDEEEEEEEDEEDEEEEAEEKKEKILLPPKKPLREKSSADLKERRAKAQGPRGDLGSPDPPPKPLRVRNKEAPAGEGTKMRKTKKKGSGEADKDPSGSPASARKSPAAMFLVGEGSPDKKALKKKGTPKGARKEEEEEEEAATVIKNSNQKGKAKGKGKKKAKEERAPSPPVEVDEPREFVLRPAPQGRTVRCRLTRDKKGMDRGMYPSYFLHLDTEKKVFLLAGRKRKRSKTANYLISIDPTNLSRGGENFIGKLRSNLLGNRFTVFDNGQNPQRGYSTNVASLRQELAAVIYETNVLGFRGPRRMTVIIPGMSAENERVPIRPRNASDGLLVRWQNKTLESLIELHNKPPVWNDDSGSYTLNFQGRVTQASVKNFQIVHADDPDYIVLQFGRVAEDAFTLDYRYPLCALQAFAIALSSFDGKLACE

SEQ ID NO: 90 - protein, 487 aa, Homo sapiens [sequence omitted]

SEQ ID NO: 91 - protein, 540 aa, Homo sapiens [sequence omitted]

SEQ ID NO: 92 - protein, 561 aa, Homo sapiens
  TUBBY LIKE PROTEIN 1 (TULP1), HOMOLOG ISOFORM A <Accession No.: NP_003311.2>
MGARTPLPSFWVSFFAETGILFPGGTPWPMGSQHSKQHRKPGPLKRGHRRDRRTTRRKYWKEGREIARVLDDEGRNLRQQKLDRQRALLEQKQKKKRQEPLMVQANADGRPRSRRARQSEEQAPLVESYLSSSGSTSYQVQEADSLASVQLGATRPTAPASAKRTKAAATAGGQGGAARKEKKGKHKGTSGPAALAEDKSEAQGPVQILTVGQSDHAQDAGETAAGGGERPSGQDLRATMQRKGISSSMSFDEDEEDEEENSSSSSQLNSNTRPSSATSRKSVREAASAPSPTAPEQPVDVEVQDLEEFALRPAPQGITIKCRITRDKKGMDRGMYPTYFLHLDREDGKKVFLLAGRKRKKSKTSNYLISVDPTDLSRGGDSYIGKLRSNLMGTKFTVYDNGVNPQKASSSTLESGTLRQELAAVCYETNVLGFKGPRKMSVIVPGMNMVHERVSIRPRNEHETLLARWQNKNTESIIELQNKTPVWNDDTQSYVLNFHGRVTQASVKNFQIIHGNDPDYIVMQFGRVAEDVFTMDYNYPLCALQAFAIALSSFDSKLACE

SEQ ID NO: 93 - protein, 506 aa, Homo sapiens
  TUBBY LIKE PROTEIN 1 (TULP1) <Accession No.: NP_813977.1>
MTSKPHSDWIPYSVLDDEGRNLRQQKLDRQRALLEQKQKKKRQEPLMVQANADGRPRSRRARQSEEQAPLVESYLSSSGSTSYQVQEADSLASVQLGATRPTAPASAKRTKAAATAGGQGGAARKEKKGKHKGTSGPAALAEDKSEAQGPVQILTVGQSDHAQDAGETAAGGGERPSGQDLRATMQRKGISSSMSFDEDEEDEEENSSSSSQLNSNTRPSSATSRKSVREAASAPSPTAPEQPVDVEVQDLEEFALRPAPQGITIKCRITRDKKGMDRGMYPTYFLHLDREDGKKVFLLAGRKRKKSKTSNYLISVDPTDLSRGGDSYIGKLRSNLMGTKFTVYDNGVNPQKASSSTLESGTLRQELAAVCYETNVLGFKGPRKMSVIVPGMNMVHERVSIRPRNEHETLLARWQNKNTESIIELQNKTPVWNDDTQSYVLNFHGRVTQASVKNFQIIHGNDPDYIVMQFGRVAEDVFTMDYNYPLCALQAFAIALSSFDSKLACE

SEQ ID NO: 94 - protein, 360 aa, Homo sapiens
  POTASSIUM VOLTAGE-GATED CHANNEL SUBFAMILY J MEMBER 13 (KCNJ13) <Accession No.: O60928.1>
MDSSNCKVIAPLLSQRYRRMVTKDGHSTLQMDGAQRGLAYLRDAWGILMDMRWRWMMLVFSASFVVHWLVFAVLWYVLAEMNGDLELDHDAPPENHTICVKYITSFTAAFSFSLETQLTIGYGTMFPSGDCPSAIALLAIQMLLGLMLEAFITGAFVAKIARPKNRAFSIRFTDTAVVAHMDGKPNLIFQVANTRPSPLTSVRVSAVLYQERENGKLYQTSVDFHLDGISSDECPFFIFPLTYYHSITPSSPLATLLQHENPSHFELVVFLSAMQEGTGEICQRRTSYLPSEIMLHHCFASLLTRGSKGEYQIKMENFDKTVPEFPTPLVSKSPNRTDLDIHINGQSIDNFQISETGLTE

SEQ ID NO: 95 - protein, 360 aa, Homo sapiens
  POTASSIUM VOLTAGE-GATED CHANNEL SUBFAMILY J MEMBER 13 (KCNJ13) <Accession No.: AAH37290.1>
MDSSNCKVIAPLLSQRYRRMVTKDGHSTLQMDGAQRGLAYLRDAWGILMDMRWRWMMLVFSASFVVHWLVFAVLWYVLAEMNGDLELDHDAPPENHTICVKYITSFTAAFSFSLETQLTIGYGTMFPSGDCPSAIALLAIQMLLGLMLEAFITGAFVAKIARPKNRAFSIRFTDIAVVAHMDGKPNLIFQVANTRPSPLTSVRVSAVLYQERENGKLYQTSVDFHLDGISSDECPFFIFPLTYYHSITPSSPLATLLQHENPSHFELVVFLSAMQEGTGEICQRRTSYLQSEIMLHHCFASLLTRGSKCEYQIKMENFDKTVPEFPTPLVSKSPNRTDLDIHINGQSIDNFQISETGLTE

SEQ ID NO: 96 - protein, 318 aa, Homo sapiens
  MITOCHONDRIALLY ENCODED NADH DEHYDROGENASE 1 (MT-ND1) <Accession No.: P03886.1>
MPMANLLLLIVPILIAMAFLMLTERKILGYMQLRKGPNVVGPYGLLQPFADAMKLFTKEPLKPATSTITLYITAPTLALTIALLLWTPLPMPNPLVNLNLGLLFILATSSLAVYSILWSGWASNSNYALIGALRAVAQTISYEVTLAIILLSTLLMSGSFNLSTLITTQEHLWLLLPSWPLAMMWFISTLAETNRTPFDLAEGESELVSGFNIEYAAGPFALFFMAEYTNIIMMNTLTTTIFLGTTYDALSPELYTTYFVTKTLLLTSLFLWIRTAYPRFRYDQLMHLLWKNFLPLTLALLMWYVSMPITISSIPPQT

SEQ ID NO: 97 - protein, 459 aa, Homo sapiens
  MITOCHONDRIALLY ENCODED NADH DEHYDROGENASE 4 (MT-ND4) <Accession No.: ACT53103.1>
MLKLIVPTIMLLPLTWLSKKHMIWINTTTHSLIISIIPLLFFNQINNNLFSCSPTFSSDPLTTPLLMLTTWLLPLTIMASQRHLSSEPLSRKKLYLSMLISLQISLIMTFTATELIMFYIFFETTLIPTLAIITRWGNQPERLNAGTYFLFYTLVGSLPLLIALIYTHNTLGSLNILLLTLTAQELSNSWANNLMWLAYTMAFMVKMPLYGLHLWLPKAHVEAPIAGSMVLAAVLLKLGGYGMMRLTLILNPLTKHMAYPFLVLSLWGMIMTSSICLRQTDLKSLIAYSSISHMALVVTAILIQTPWSFTGAVILMIAHGLTSSLLFCLANSNYERTHSRIMILSQGLQTLLPLMAFWWLLASLANLALPPTINLLGELSVLVTTFSWSNITLLLTGLNMLVTALYSLYMFTTTQWGSLTHHINNMKPSFTRENTLMFMHLSPILLLSLNPDIITGFSS

SEQ ID NO: 98 - protein, 174 aa, Homo sapiens
  MITOCHONDRIALLY ENCODED NADH DEHYDROGENASE 6 (MT-ND6) <Accession No.: ACT53105.1>
MMYALFLLSVGLVMGFVGFSSKPSPIYGGLVLIVSGVVGCVIILNFGGGYMGLMVFLIYLGGMMVVFGYTTAMAIEEYPEAWGSGVEVLVSVLVGLAMEVGLVLWVKEYDGVVVVVNFNSVGSWMIYEGEGSGLIREDPIGAGALYDYGRWLVVVTGWTLFVGVYIVIEIARGN

SEQ ID NO: 99 - protein, 1306 aa, Homo sapiens
  ANGIOTENSIN I CONVERTING ENZYME (ACE) <Accession No.: P12821.1>
MGAASGRRGPGLLLPLPLLLLLPPQPALALDPGLQPGNFSADEAGAQLFAQSYNSSAEQVLFQSVAASWAHDTNITAENARRQEEAALLSQEFAEAWGQKAKELYEPIWQNFTDPQLRRIIGAVRTLGSANLPLAKRQQYNALLSNMSRIYSTAKVCLPNKTATCWSLDPDLTNILASSRSYAMLLFAWEGWHNAAGIPLKPLYEDFTALSNEAYKQDGFTDTGAYWRSWYNSPTFEDDLEHLYQQLEPLYLNLHAFVRRALHRRYGDRYINLRGPIPAHLLGDMWAQSWENIYDMVVPFPDKPNLDVTSTMLQQGWNATHMFRVAEEFFTSLELSPMPPEFWEGSMLEKPADGREVVCHASAWDFYNRKDFRIKQCTRVTMDQLSTVHHEMGHIQYYLQYKDLPVSLRRGANPGFHEAIGDVLALSVSTPEHLHKIGLLDRVTNDTESDINYLLKMALEKIAFLPFGYLVDQWRWGVFSGRTPPSRYNFDWWYLRTKYQGICPPVTRNETHFDAGAKFHVPNVTPYIRYFVSFVLQFQFHEALCKEAGYEGPLHQCDIYRSTKAGAKLRKVLQAGSSRPWQEVLKDMVGLDALDAQPLLKYFQPVTQWLQEQNQQNGEVLGWPEYQWHPPLPDNYPEGIDLVTDEAEASKFVEEYDRTSQVVWNEYAEANWNYNTNITTETSKILLQKNMQIANHTLKYGTQARKFDVNQLQNTTIKRIIKKVQDLERAALPAQELEEYNKILLDMETTYSVATVCHPNGSCLQLEPDLTNVMATSRKYEDLLWAWEGWRDKAGRAILQFYPKYVELINQAARLNGYVDAGDSWRSMYETPSLEQDLERLFQELQPLYLNLHAYVRRALHRHYGAQHINLEGPIPAHLLGNMWAQTWSNIYDLVVPFPSAPSMDTTEAMLKQGWTPRRMFKEADDFFTSLGLLPVPPEFWNKSMLEKPTDGREVVCHASAWDFYNGKDFRIKQCTTVNLEDLVVAHHEMGHIQYFMQYKDLPVALREGANPGFHEAIGDVLALSVSTPKHLHSLNLLSSEGGSDEHDINFLMKMALDKIAFIPFSYLVDQWRWRVFDGSITKENYNQEWWSLRLKYQGLCPPVPRTQGDFDPGAKFHIPSSVPYIRYFVSFIIQFQFHEALCQAAGHTGPLHKCDIYQSKEAGQRLATAMKLGFSRPWPEAMQLITGQPNMSASAMLSYFKPLLDWLRTENELHGEKLGWPQYNWTPNSARSEGPLPDSGRVSFLGLDLDAQQARVGQWLLLFLGIALLVATLGLSQRLFSIRHRSLHRHSHGPQFGSEVELRHS

SEQ ID NO: 100 - protein, 1306 aa, Homo sapiens; identical to SEQ ID NO: 99
  ANGIOTENSIN I CONVERTING ENZYME (ACE), ISOFORM 1 PRECURSOR <Accession No.: NP_000780.1>

SEQ ID NO: 101 - protein, 732 aa, Homo sapiens
  ANGIOTENSIN I CONVERTING ENZYME (ACE), ISOFORM 2 PRECURSOR <Accession No.: NP_690043.1>
MGQGWATAGLPSLLFLLLCYGHPLLVPSQEASQQVTVTHGTSSQATTSSQTTTHQATAHQTSAQSPNLVTDEAEASKFVEEYDRTSQVVWNEYAEANWNYNTNITTETSKILLQKNMQIANHTLKYGTQARKFDVNQLQNTTIKRIIKKVQDLERAALPAQELEEYNKILLDMETTYSVATVCHPNGSCLQLEPDLTNVMATSRKYEDLLWAWEGWRDKAGRAILQFYPKYVELINQAARLNGYVDAGDSWRSMYETPSLEQDLERLFQELQPLYLNLHAYVRRALHRHYGAQHINLEGPIPAHLLGNMWAQTWSNIYDLVVPFPSAPSMDTTEAMLKQGWTPRRMFKEADDFFTSLGLLPVPPEFWNKSMLEKPTDGREVVCHASAWDFYNGKDFRIKQCTTVNLEDLVVAHHEMGHIQYFMQYKDLPVALREGANPGFHEAIGDVLALSVSTPKHLHSLNLLSSEGGSDEHDINFLMKMALDKIAFIPFSYLVDQWRWRVFDGSITKENYNQEWWSLRLKYQGLCPPVPRTQGDFDPGAKFHIPSSVPYIRYFVSFIIQFQFHEALCQAAGHTGPLHKCDIYQSKEAGQRLATAMKLGFSRPWPEAMQLITGQPNMSASAMLSYFKPLLDWLRTENELHGEKLGWPQYNWTPNSARSEGPLPDSGRVSFLGLDLDAQQARVGQWLLLFLGIALLVATLGLSQRLFSIRHRSLHRHSHGPQFGSEVELRHS

SEQ ID NO: 102 - protein, 178 aa, Homo sapiens
  INTERLEUKIN 10 (IL10) <Accession No.: CAG46790.1>
MHSSALLCCLVLLTGVRASPGQGTQSENSCTHFPGNLPNMLRDLRDAFSRVKTFFQMKDQLDNLLLKESLLEDFKGYLGCQALSEMIQFYLEEVMPQAENQDPDIKAHVNSLGENLKTLRLRLRRCHRFLPCENKSKAVEQVKNAFNKLQEKGIYKAMSEFDIFINYIEAYMTMKIRN

SEQ ID NO: 103 - protein, 653 aa, Homo sapiens
  RAB ESCORT PROTEIN 1 (CHM) <Accession No.: EAW98559.1>
MADTLPSEFDVIVIGTGLPESIIAAACSRSGRRVLHVDSRSYYGGNWASFSFSGLLSWLKEYQENSDIVSDSPVWQDQILENEEAIALSRKDKTIQHVEVFCYASQDLHEDVEEAGALQKNHALVTSANSTEAADSAFLPTEDESLSTMSCEMLTEQTPSSDPENALEVNGAEVTGEKENHCDDKTCVPSTSAEDMSENVPIAEDTTEQPKKNRITYSQIIKEGRRFNIDLVSKLLYSRGLLIDLLIKSNVSRYAEFKNITRILAFREGRVEQVPCSRADVFNSKQLTMVEKRMLMKFLTFCMEYEKYPDEYKGYEEITFYEYLKTQKLTPNLQYIVMHSIAMTSETASSTIDGLKATKNFLHCLGRYGNTPFLFPLYGQGELPQCFCRMCAVFGGIYCLRHSVQCLVVDKESRKCKAIIDQFGQRIISEHFLVEDSYFPENMCSRVQYRQISRAVLITDRSVLKTDSDQQISILTVPAEEPGTFAVRVIELCSSTMTCMKGTYLVHLTCTSSKTAREDLESVVQKLFVPYTEMEIENEQVEKPRILWALYFNMRDSSDISRSCYNDLPSNVYVCSGPDCGLGNDNAVKQAETLFQEICPNEDFCPPPPNPEDIILDGDSLQPEASESSAIPEANSETFKESTNLGNLEESSE

SEQ ID NO: 104 - protein, 224 aa, Homo sapiens
  RETINOSCHISIN (RS1) <Accession No.: NP_000321.1>
MSRKIEGFLLLLLFGYEATLGLSSTEDEGEDPWYQKACKCDCQGGPNALWSAGATSLDCIPECPYHKPLGFESGEVTPDQITCSNPEQYVGWYSSWTANKARLNSQGFGCAWLSKFQDSSQWLQIDLKEIKVISGILTQGRCDIDEWMTKYSVQYRTDERLNWIYYKDQTGNNRVFYGNSDRTSTVQNLLRPPIISRFIRLIPLGWHVRIAIRMELLECVSKCA

SEQ ID NO: 105 - protein, 50 aa, Homo sapiens
  RETINOSCHISIN (RS1), PARTIAL <Accession No.: ABK40506.1>
VFYGNSDRTSTVQNLLRPPIISRFIRLIPLGCHVRIAIRMELLECVSKCA

SEQ ID NO: 106 - protein, 593 aa, Homo sapiens
  BARDET-BIEDL SYNDROME 1 (BBS1) <Accession No.: AAM92770.1>
MAAASSSDSDACGAESNEANSKWLDAHYDPMANIHTFSACLALADLHGDGEYKLVVGDLGPGGQQPRLKVLKGPLVMTESPLPALPAAAATFLMEQHEPRTPALALASGPCVYVYKNLRPYFKFSLPQLPPNPLEQDLWNQAKEDRIDPLTLKEMLESIRETAEEPLSIQSLRFLQLELSEMEAFVNQHKSNSIKRQTVITTMTTLKKNLADEDAVSCLVLGTENKELLVLDPEAFTILAKMSLPSVPVFLEVSGQFDVEFRLAAACRNGNIYILRRDSKHPKYCIELSAQPVGLIRVHKVLVVGSTQDSLHGFTHKGKKLWTVQMPAAILTMNLLEQHSRGLQAVMAGLANGEVRIYRDKALLNVIHTPDAVTSLCFGRYGREDNTLIMTTRGGGLIIKILKRTAVFVEGGSEVGPPPAQAMKLNVPRKTRLYVDQTLREREAGTAMHRAFQTDLYLLRLRAARAYLQALESSLSPLSTTAREPLKLHAVVQGLGPTFKLTLHLQNTSTTRPVLGLLVCFLYNEALYSLPRAFFKVPLLVPGLNYPLETFVESLSNKGISDIIKVLVLREGQSAPLLSAHVNMPGSEGLAAA

SEQ ID NO: 107 - protein, 721 aa, Homo sapiens
  BARDET-BIEDL SYNDROME 2 (BBS2) <Accession No.: AAH14140.1>
MLLPVFTLKLRHKISPRMVAIGRYDGTHPCLAAATQTGKVFIHNPHTRNQHVSASRVFQSPLESDVSLLNINQAVSCLTAGVLNPELGYDALLVGTQTNLLAYDVYNNSDLFYREVADGANVVVLGTLGDISSPLAIIGGNCALQGFNHEGSDLFWTVTGDNVNSLALCDFDGDGKKELLVGSEDFDIRVFKEDEIVAEMTETEIVTSLCPMYGSRFGYALSNGTVGVYDKTSRYWRIKSKNHAMSIHAFDLNSDGVNELITGWSNGKVDARSDRTGEVIFKDNFSSAIAGVVEGDYRMDGHIQLICCSVDGEIRGYLPGTAEMRGNLMDTSAEQDLIRELSQKKQNLLLELRNYEENAKAELASPLNEADGHRGIIPANTRLHTTLSVSLGNETQTAHTELRISTSNDTIIRAVLIFAEGIFTGESHVVHPSIHNLSSSICIPIVPPKDVPVDLHLKAFVGYRSSTQFHVFESTRQLPRFSMYALTSLDPASEPISYVNFTIAERAQRVVVWLGQNFLLPEDTHIQNAPFQVCFTSLRNGGHLHIKIKLSGEITINTDDIDLAGDIIQSMASFFAIEDLQVEADFPVYFEELRKVLVKVDEYHSVHQKLSADMADHSNLIRSLLVGAEDARLMRDMKTMKSRYMELYDLNRDLLNGYKIRCNNHTELLGNLKAVNQAIQRAGRLRVGKPKNQVITACRDAIRSNNINTLFKIMRVGTASS

SEQ ID NO: 108 - protein, 193 aa, Homo sapiens
  ADP RIBOSYLATION FACTOR LIKE GTPASE 6 (ARL6), ISOFORM BB3SL <Accession No.: NP_001310442.1>
MGLLDRLSVLLGLKKKEVHVLCLGLDNSGKTTIINKLKPSNAQSQNILPTIGFSIEKFKSSSLSFTVFDMSGQGRYRNLWEHYYKEGQAIIFVIDSSDRLRMVVAKEELDTLLNHPDIKHRRIPILFFANKMDLRDAVTSVKVSQLLCLENIKDKPWHICASDAIKGEGLQEGVDWLQEKTIQSDPDCEDMKR

SEQ ID NO: 109 - protein, 186 aa, Homo sapiens
  ADP RIBOSYLATION FACTOR LIKE GTPASE 6 (ARL6), ISOFORM 1 <Accession No.: NP_001265222.1>
MGLLDRLSVLLGLKKKEVHVLCLGLDNSGKTTIINKLKPSNAQSQNILPTIGFSIEKFKSSSLSFTVFDMSGQGRYRNLWEHYYKEGQAIIFVIDSSDRLRMVVAKEELDTLLNHPDIKHRRIPILFFANKMDLRDAVTSVKVSQLLCLENIKDKPWHICASDAIKGEGLQEGVDWLQDQIQTVKT

SEQ ID NO: 110 - protein, 159 aa, Homo sapiens
  ADP RIBOSYLATION FACTOR LIKE GTPASE 6 (ARL6), ISOFORM 2 <Accession No.: NP_001310443.1>
MGLLDRLSVLLGLKKKEVHVLCLGLDNSGKTTIINKLKPSNAQSQNILPTIGFSIEKFKSSSLSFTVFDMSGQGRYRNLWEHYYKEGQAIIFVIDSSDRLRMVVAKEELDTLLNHPDIKHRRIPILFFANKMDLRDAVTSVKVSQLLCLENIKDKPWHI

SEQ ID NO: 111 - protein, 519 aa, Homo sapiens
  BARDET-BIEDL SYNDROME 4 (BBS4) <Accession No.: AAH27624.1>
MAEERVATRTQFPVSTESQKPRQKKAPEFPILEKQNWLIHLHYIRKDYEACKAVIKEQLQETQGLCEYAIYVQALIFRLEGNIQESLELFQTCAVLSPQSADNLKQVARSLFLLGKHKAAIEVYNEAAKLNQKDWEISHNLGVCYIYLKQFNKAQDQLHNALNLNRHDLTYIMLGKIHLLEGDLDKAIEVYKKAVEFSPENTELLTTLGLLYLQLGIYQKAFEHLGNALTYDPTNYKAILAAGSMMQTHGDFDVALTKYRVVACAVPESPPLWNNIGMCFFGKKKYVAAISCLKRANYLAPFDWKILYNLGLVHLTMQQYASAFHFLSAAINFQPKMGELYMLLAVALTNLEDTENAKRAYAEAVHLDKCNPLVNLNYAVLLYNQGEKKNALVQYQEMEKKVSLLKDNSSLEFDSEMVEMAQKLGAALQVGEALVWTKPVKDPKSKHQTTSTSKPASFQQPLGSNQALGQAMSSAAAYRTLPSGAGGTSQFTKPPSLPLEPEPAVESSPTETSEQIREK

SEQ ID NO: 112 - protein, 519 aa, Homo sapiens
  BARDET-BIEDL SYNDROME 4 (BBS4), ISOFORM 1 <Accession No.: NP_149017.2>
MAEERVATRTQFPVSTESQKPRQKKAPEFPILEKQNWLIHLHYIRKDYEACKAVIKEQLQETQGLCEYAIYVQALIFRLEGNIQESLELFQTCAVLSPQSADNLKQVARSLFLLGKHKAAIEVYNEAAKLNQKDWEISHNLGVCYIYLKQFNKAQDQLHNALNLNRHDLTYIMLGKIHLLEGDLDKAIEVYKKAVEFSPENTELLTTLGLLYLQLGIYQKAFEHLGNALTYDPTNYKAILAAGSMMQTHGDFDVALTKYRVVACAVPESPPLWNNIGMCFFGKKKYVAAISCLKRANYLAPFDWKILYNLGLVHLTMQQYASAFHFLSAAINFQPKMGELYMLLAVALTNLEDIENAKRAYAEAVHLDKCNPLVNLNYAVLLYNQGEKKNALAQYQEMEKKVSLLKDNSSLEFDSEMVEMAQKLGAALQVGEALVWTKPVKDPKSKHQTTSTSKPASFQQPLGSNQALGQAMSSAAAYRTLPSGAGGTSQFTKPPSLPLEPEPAVESSPTETSEQIREK

SEQ ID NO: 113 - protein, 347 aa, Homo sapiens
  BARDET-BIEDL SYNDROME 4 (BBS4), ISOFORM 2 <Accession No.: NP_001239607.1>
MLGKIHLLEGDLDKAIEVYKKAVEFSPENTELLTTLGLLYLQLGIYQKAFEHLGNALTYDPTNYKAILAAGSMMQTHGDFDVALTKYRVVACAVPESPPLWNNIGMCFFGKKKYVAAISCLKRANYLAPFDWKILYNLGLVHLTMQQYASAFHFLSAAINFQPKMGELYMLLAVALTNLEDIENAKRAYAEAVHLDKCNPLVNLNYAVLLYNQGEKKNALAQYQEMEKKVSLLKDNSSLEFDSEMVEMAQKLGAALQVGEALVWTKPVKDPKSKHQTTSTSKPASFQQPLGSNQALGQAMSSAAAYRTLPSGAGGTSQFTKPPSLPLEPEPAVESSPTETSEQIREK

SEQ ID NO: 114 - protein, 496 aa, Homo sapiens
  BARDET-BIEDL SYNDROME 4 (BBS4), ISOFORM 3 <Accession No.: NP_001307594.1>
MAEERVATRTQFPVSTESQKPRQKKAPEFPILEKQNWLIHLHYIRKDYEACKAVIKEQLQETQGLCEYAIYVQALIFRLEGNIQESLELFQTCAVLSPQSADNLKQVARSLFLLGKHKAAIEVYNEAAKLNQKDWEISHNLGVCYIYLKQFNKAQDQLHNALNLNRHDLTYIMLGKIHLLEGDLDKAIEVYKKAVEFSPENTELLTTLGLLYLQAILAAGSMMQTHGDFDVALTKYRVVACAVPESPPLWNNIGMCFFGKKKYVAAISCLKRANYLAPFDWKILYNLGLVHLTMQQYASAFHFLSAAINFQPKMGELYMLLAVALTNLEDIENAKRAYAEAVHLDKCNPLVNLNYAVLLYNQGEKKNALAQYQEMEKKVSLLKDNSSLEFDSEMVEMAQKLGAALQVGEALVWTKPVKDPKSKHQTTSTSKPASFQQPLGSNQALGQAMSSAAAYRTLPSGAGGTSQFTKPPSLPLEPEPAVESSPTETSEQIREK

SEQ ID NO: 115 - protein, 341 aa, Homo sapiens
  BARDET-BIEDL SYNDROME 5 (BBS5) <Accession No.: NP_689597.1>
MSVLDALWEDRDVRFDLSAQQMKTRPGEVLIDCLDSIEDTKGNNGDRGRLLVTNLRILWHSLALSRVNVSVGYNCILNITTRTANSKLRGQTEALYILTKCNSTRFEFIFTNLVPGSPRLFTSVMAVHRAYETSKMYRDFKLRSALIQNKQLRLLPQEHVYDKINGVWNLSSDQGNLGTFFITNVRIVWHANMNDSFNVSIPYLQIRSIKIRDSKFGLALVIESSQQSGGYVLGFKIDPVEKLQESVKEINSLHKVYSASPIFGVDYEMEEKPQPLEALTVEQIQDDVEIDSDGHTDAFVAYFADGNKQQDREPVFSEELGLAIEKLKDGFTLQGLWEVMS

SEQ ID NO: 116 - protein, 341 aa, Homo sapiens; identical to SEQ ID NO: 115
  BARDET-BIEDL SYNDROME 5 (BBS5), ISOFORM 1 <Accession No.: AAT08182.1>

SEQ ID NO: 117 - protein, 320 aa, Homo sapiens
  BARDET-BIEDL SYNDROME 5 (BBS5), ISOFORM 2 <Accession No.: AAT08183.1>
MSVLDALWEDRDVRFDLSAQQMKTRPGEVLIDCLDSIEDTKGNNGDRGRLLVTNLRILWHSLALSRVNVSVGYNCILNITTRTANSKLRGQTEALYILTKCNSTRFEFIFTNLVPGSPRLFTSVMAVHRAYETSKMYRDFKLRSALIQNKQLRLLPQEHVYDKINGVWNLSSDQGNLGTFFITNVRIVWHANMNDSFNVSIPYLQISGGYVLGFKIDPVEKLQESVKEINSLHKVYSASPIFGVDYEMEEKPQPLEALTVEQIQDDVEIDSDGHTDAFVAYFADGNKQQDREPVFSEELGLAIEKLKDGFTLQGLWEVMS

SEQ ID NO: 118 - protein, 570 aa, Homo sapiens [sequence omitted]

SEQ ID NO: 119 - protein, 63 aa, Homo sapiens
  MCKUSICK-KAUFMAN SYNDROME (MKKS), ISOFORM CRA_A <Accession No.: EAX10343.1>
MSLRNLWRDYKVLVVMVPLVGLIHLGWYRIKSSPVFQIPKNDDIPEQDSLGLSNLQKSQIQGK

SEQ ID NO: 120 - protein, 570 aa, Homo sapiens
  MCKUSICK-KAUFMAN SYNDROME (MKKS), ISOFORM CRA_B <Accession No.: EAX10344.1>
MSRLEAKKPSLCKSEPLTTERVRTTLSVLKRIVTSCYGPSGRLKQLHNGFGGYVCTTSQSSALLSHLLVTHPILKILTASIQNHVSSFSDCGLFTAILCCNLIENVQRLGLTPTTVIRLNKHLLSLCISYLKSETCGCRIPVDFSSTQILLCLVRSILTSKPACMLTRKETEHVSALILRAFLLTIPENAEGHIILGKSLIVPLKGQRVIDSTVLPGILIEMSEVQLMRLLPIKKSTALKVALFCTTLSGDTSDTGEGTVVVSYGVSLENAVLDQLLNLGRQLISDHVDLVLCQKVIHPSLKQFLNMHRIIAIDRIGVTLMEPLTKMTGTQPIGSLGSICPNSYGSVKDVCTAKFGSKHFFHLIPNEATICSLLLCNRNDTAWDELKLTCQTALHVLQLTLKEPWALLGGGCTETHLAAYIRHKTHNDPESILKDDECTQTELQLIAEAFCSALESVVGSLEHDGGEILTDMKYGHLWSVQADSPCVANWPDLLSQCGCGLYNSQEELNWSFLRSTRRPFVPQSCLPHEAVGSASNLTLDCLTAKLSGLQVAVETANLILDLSYVIEDKN

SEQ ID NO: 121 - protein, 672 aa, Homo sapiens
  BARDET-BIEDL SYNDROME 7 (BBS7) <Accession No.: AAH32691.1>
MDLILNRMDYLQVGVTSQKTMKLIPASRHRATQKVVIGDHDGVVMCFGMKKGEAAAVFKTLPGPKIARLELGGVINTPQEKIFIAAASEIRGFTKRGKQFLSFETNLTESIKAMHISGSDLFLSASYIYNHYCDCKDQHYYLSGDKINDVICLPVERLSRITPVLACQDRVLRVLQGSDVMYAVEVPGPPTVLALHNGNGGDSGEDLLFGTSDGKLALIQITTSKPVRKWEIQNEKKRGGILCIDSFDIVGDGVKDLLVGRDDGMVEVYSFDNANEPVLRFDQMLSESVTSIQGGCVGKDSYDEIVVSTYSGWVTGLTTEPIHKESGPGEELKINQEMQNKISSLRNELEHLQYKVLQERENYQQSSQSSKAKSAVPSFGINDKFTLNKDDASYSLILEVQTAIDNVLIQSDVPIDLLDVDKNSAVVSFSSCDSESNDNFLLATYRCQADTTRLELKIRSIEGQYGTLQAYVTPRIQPKTCQVRQYHIKPLSLHQRTHFIDHDRPMNTLTLTGQFSFAEVHSWVVFCLPEVPEKPPAGECVTFYFQNTFLDTQLESTYRKGEGVFKSDNISTISILKDVLSKEATKRKINLNISYEINEVSVKHTLKLIHPKLEYQLLLAKKVQLIDALKELQIHEGNTNFLIPEYHCILEEADHLQEEYKKQPAHLERLYG

SEQ ID NO: 122 - protein, 715 aa, Homo sapiens
  BARDET-BIEDL SYNDROME 7 (BBS7), ISOFORM A <Accession No.: NP_789794.1>
MDLILNRMDYLQVGVTSQKTMKLIPASRHRATQKVVIGDHDGVVMCFGMKKGEAAAVFKTLPGPKIARLELGGVINTPQEKIFIAAASEIRGFTKRGKQFLSFETNLTESIKAMHISGSDLFLSASYIYNHYCDCKDQHYYLSGDKINDVICLPVERLSRITPVLACQDRVLRVLQGSDVMYAVEVPGPPTVLALHNGNGGDSGEDLLFGTSDGKLALIQITTSKPVRKWEIQNEKKRGGILCIDSFDIVGDGVKDLLVGRDDGMVEVYSFDNANEPVLRFDQMLSESVTSIQGGCVGKDSYDEIVVSTYSGWVTGLTTEPIHKESGPGEELKINQEMQNKISSLRNELEHLQYKVLQERENYQQSSQSSKAKSAVPSFGINDKFTLNKDDASYSLILEVQTAIDNVLIQSDVPIDLLDVDKNSAVVSFSSCDSESNDNFLLATYRCQADTTRLELKIRSIEGQYGTLQAYVTPRIQPKTCQVRQYHIKPLSLHQRTHFIDHDRPMNTLTLTGQFSFAEVHSWVVFCLPEVPEKPPAGECVTFYFQNTFLDTQLESTYRKGEGVFKSDNISTISILKDVLSKEATKRKINLNISYEINEVSVKHTLKLIHPKLEYQLLLAKKVQLIDALKELQIHEGNTNFLIPEYHCILEEADHLQEEYKKQPAHLERLYGMITDLFIDKFKFKGTNVKTKVPLLLEILDSYDQNALISFFDAA

SEQ ID NO: 123 - protein, 672 aa, Homo sapiens; identical to SEQ ID NO: 121
  BARDET-BIEDL SYNDROME 7 (BBS7), ISOFORM B <Accession No.: NP_060660.2>

SEQ ID NO: 124 - protein, 505 aa, Homo sapiens
  TETRATRICOPEPTIDE REPEAT DOMAIN 8 (TTC8)  <Accession No.: AAH95433.1>
MSSEMEPLLLAWSYFRRRKFQLCADLCTQMLEKSPYDQAAWILKARALTEMVYIDEIDVDQEGIAEMMLDENAIAQVPRPGTSLKLPGTNQTGGPSQAVRPITQAGRPITGFLRPSTQSGRPGTMEQAIRTPRTAYTARPITSSSGRFVRLGTASMLTSPDGPFINLSRLNLTKYSQKPKLAKALFEYIFHHENDVKTALDLAALSTEHSQYKDWWWKVQIGKCYYRLGMYREAEKQFKSALKQQEMVDTFLYLAKVYVSLDQPVTALNLFKQGLDKFPGEVTLLCGIARIYEEMNNMSSAAEYYKEVLKQDNTHVEAIACIGSNHFYSDQPEIALRFYRRLLQMGIYNGQLFNNLGLCCFYAQQYDMTLTSFERALSLAENEEEAADVWYNLGHVAVGIGDTNLAHQCFRLALVNNNNHAEAYNNLAVLEMRKGHVEQARALLQTASSLAPHMYEPHFNFATISDKIGDLQRSYVAAQKSEAAFPDHVDTQHLIKQLRQHFAML

SEQ ID NO: 125 - protein, 515 aa, Homo sapiens
  TETRATRICOPEPTIDE REPEAT DOMAIN 8 (TTC8), ISOFORM A <Accession No.: NP_653197.2>
MSSEMEPLLLAWSYFRRRKFQLCADLCTQMLEKSPYDQEPDPELPVHQAAWILKARALTEMVYIDEIDVDQEGIAEMMLDENAIAQVPRPGTSLKLPGTNQTGGPSQAVRPITQAGRPITGFLRPSTQSGRPGTMEQAIRTPRTAYTARPITSSSGRFVRLGTASMLTSPDGPFINLSRLNLTKYSQKPKLAKALFEYIFHHENDVKTALDLAALSTEHSQYKDWWWKVQIGKCYYRLGMYREAEKQFKSALKQQEMVDTFLYLAKVYVSLDQPVTALNLFKQGLDKFPGEVTLLCGIARIYEEMNNMSSAAEYYKEVLKQDNTHVEAIACIGSNHFYSDQPEIALRFYRRLLQMGIYNGQLFNNLGLCCFYAQQYDMTLTSFERALSLAENEEEAADVWYNLGHVAVGIGDTNLAHQCFRLALVNNNNHAEAYNNLAVLEMRKGHVEQARALLQTASSLAPHMYEPHFNFATISDKIGDLQRSYVAAQKSEAAFPDHVDTQHLIKQLRQHFAML

SEQ ID NO: 126 - protein, 505 aa, Homo sapiens; identical to SEQ ID NO: 124
  TETRATRICOPEPTIDE REPEAT DOMAIN 8 (TTC8), ISOFORM B <Accession No.: NP_938051.1>

SEQ ID NO: 127 - protein, 887 aa, Homo sapiens
  BARDET-BIEDL SYNDROME 9 (BBS9) <Accession No.: AAI03832.1>
MSLFKARDWWSTILGDKEEFDQGCLCLANVDNSGNGQDKIIVGSFMGYLRIFSPHPAKTGDGAQAEDLLLEVDLRDPVLQVEVGKFVSGTEMLHLAVLHSRKLCVYSVSGTLGNVEHGNQCQMKLMYEHNLQRTACNMTYGSFGGVKGRDLICIQSMDGMLMVFEQESYAFGRFLPGFLLPGPLAYSSRTDSFLTVSSCQQVESYKYQVLAFATDADKRQETEQQKLGSGKRLVVDWTLNIGEQALDICIVSFNQSASSVFVLGERNFFCLKDNGQIRFMKKLDWSPSCFLPYCSVSEGTINTLIGNHNNMLHIYQDVTLKWATQLPHIPVAVRVGCLHDLKGVIVTLSDDGHLQCSYLGTDPSLFQAPNVQSRELNYDELDVEMKELQKIIKDVNKSQGVWPMTEREDDLNVSVVVSPNFDSVSQATDVEVGTDLVPSVTVKVTLQNRVILQKAKLSVYVQPPLELTCDQFTFEFMTPDLTRTVSFSVYLKRSYTPSELEGNAVVSYSRPTDRNPDGIPRVIQCKFRLPLKLICLPGQPSKTASHKITIDTNKSPVSLLSLFPGFASQSDDDQVNVMGFHFLGGARITVLASKTSQRYRIQSEQFEDLWLITNELILRLQEYFEKQGVKDFACSFSGSIPLQEYFELIDHHFELRINGEKLEELLSERAVQFRAIQRRLLARFKDKTPAPLQHLDTLLDGTYKQVIALADAVEENQGNLFQSFTRLKSATHLVILLIALWQKLSADQVAILEAAFLPLQEDTQELGWEETVDAAISHLLKTCLSKSSKEQALNLNSQLNIPKDTSQLKKHITLLCDRLSKGGRLCLSTDAAAPQTMVMPGGCTTIPESDLEERSVEQDSTELFTNHRHLTAETPRPEVSPLQGVSE

SEQ ID NO: 128 - protein, 723 aa, Homo sapiens [sequence omitted]

SEQ ID NO: 129 - protein, 653 aa, Homo sapiens
  TRIPARTITE MOTIF CONTAINING 32 (TRIM32)  <Accession No.: AAH03154.1>
MAAAAASHLNLDALREVLECPICMESFTEEQLRPKLLHCGHTICRQCLEKLLASSINGVRCPFCSKITRITSLTQLTDNLTVLKIIDTAGLSEAVGLLMCRSCGRRLPRQFCRSCGLVLCEPCREADHQPPGHCTLPVKEAAEERRRDFGEKLTRLRELMGELQRRKAALEGVSKDLQARYKAVLQEYGHEERRVQDELARSRKFFTGSLAEVEKSNSQVVEEQSYLLNIAEVQAVSRCDYFLAKIKQADVALLEETADEEEPELTASLPRELTLQDVELLKVGHVGPLQIGQAVKKPRTVNVEDSWAMEATASAASTSVTFREMDMSPEEVVASPRASPAKQRGPEAASNIQQCLFLKKMGAKGSTPGMFNLPVSLYVTSQGEVLVADRGNYRIQVFTRKGFLKEIRRSPSGIDSFVLSFLGADLPNLTPLSVAMNCQGLIGVTDSYDNSLKVYTLDGHCVACHRSQLSKPWGITALPSGQFVVTDVEGGKLWCFTVDRGSGVVKYSCLCSAVRPKFVTCDAEGTVYFTQGLGLNLENRQNEHHLEGGFSIGSVGPDGQLGRQISHFFSENEDFRCIAGMCVDARGDLIVADSSRKEILHFPKGGGYSVLIREGLTCPVGIALTPKGQLLVLDCWDHCIKIYSYHLRRYSTP

SEQ ID NO: 130 - protein, 653 aa, Homo sapiens; identical to SEQ ID NO: 129
  TRIPARTITE MOTIF CONTAINING 32 (TRIM32), ISOFORM CRA_A <Accession No.: EAW87447.1>

SEQ ID NO: 131 - protein, 710 aa, Homo sapiens
  BARDET-BIEDL SYNDROME 12 (BBS12) <Accession No.: AAH55426.1>
MVMACRVVNKRRHMGLQQLSSFAETGRTFLGPLKSSKFIIDEECHESVLISSTVRLLESLDLTSAVGQLLNEAVQAQNNTYRTGISTLLFLVGAWSSAVEECLHLGVPISIIVSVMSEGLNFCSEEVVSLHVPVHNIFDCMDSTKTFSQLETFSVSLCPFLQVPSDTDLIEELHGLKDVASQTLTISNLSGRPLRSYELFKPQTKVEADNNTSRTLKNSLLADTCCRQSILIHSRHFNRTDNTEGVSKPDGFQEHVTATHKTYRCNDLVELAVGLSHGDHSSMKLVEEAVQLQYQNACVQQGNCTKPFMFDISRIFTCCLPGLPETSSCVCPGYITVVSVSNNPVIKELQNQPVRIVLIEGDLTENYRHLGFNKSANIKTVLDSMQLQEDSSEELWANHVLQVLIQFKVNLVLVQGNVSERLIEKCINSKRLVIGSVNGSVMQAFAEAAGAVQVAYITQVNEDCVGNGVCVTFWRSSPLDVVDRNNRIAILLKTEGINLVTAVLTNPVTAQMQIKEDRFWTCAYRLYYALKEEKVFLGGGAVEFLCLSCLHILAEQSLKKENHACSGWLHNTSSWLASSLAIYRPTVLKFLANGWQKYLSTLLYNTANYSSEFEVSTYIQHHLQNATDSGSPSSYILNEYSKLNSRIFNSDISNKLEQIPRVYDVVTPKIEAWRRALDLVLLVLQTDSEIITGHGHTQINSQELTGFLFL

SEQ ID NO: 132 - protein, 559 aa, Homo sapiens
  MKS TRANSITION ZONE COMPLEX SUBUNIT 1 (MKS1) <Accession No.: NP_060247.2>
MAETVWSTDTGEAVYRSRDPVRNLRLRVHLQRITSSNFLHYQPAAELGKDLIDLATFRPQPTASGHRPEEDEEEEIVIGWQEKLFSQFEVDLYQNETACQSPLDYQYRQEILKLENSGGKKNRRIFTYTDSDRYTNLEEHCQRMTTAASEVPSFLVERMANVRRRRQDRRGMEGGILKSRIVTWEPSEEFVRNNHVINTPLQTMHIMADLGPYKKLGYKKYEHVLCTLKVDSNGVITVKPDFTGLKGPYRIETEGEKQELWKYTIDNVSPHAQPEEEERERRVFKDLYGRHKEYLSSLVGTDFEMTVPGALRLFVNGEVVSAQGYEYDNLYVHFFVELPTAHWSSPAFQQLSGVTQTCTTKSLAMDKVAHFSYPFTFEAFFLHEDESSDALPEWPVLYCEVLSLDFWQRYRVEGYGAVVLPATPGSHTLTVSTWRPVELGTVAELRRFFIGGSLELEDLSYVRIPGSFKGERLSRFGLRTETTGTVTFRLHCLQQSRAFMESSSLQKRMRSVLDRLEGFSQQSSIHNVLEAFRRARRRMQEARESLPQDLVSPSGTLVS

SEQ ID NO: 133 - protein, 587 aa, Homo sapiens
  WD REPEAT CONTAINING PLANAR CELL POLARITY EFFECTOR (WDPCP), HOMOLOG ISOFORM 1 <Accession No.: NP_001036157.1>
MFSSLHSALLTDSFIILSFLAQNKLCFIQFTKKMESSDVNKRLEKLSALDYKIFYYEIPGPINKTTERHLAINCVHDRVVCWWPLVNDDAWPWAPISSEKDRANLLLLGYAQGRLEVLSSVRTEWDPLDVRFGTKQPYQVFTVEHSVSVDKEPMADSCIYECIRNKIQCVSVTRIPLKSKAISCCRNVTEDKLILGCEDSSLILYETHRRVTLLAQTELLPSLISCHPSGAILLVGSNQGELQIFDMALSPINIQLLAEDRLPRETLQFSKLFDASSSLVQMQWIAPQVVSQKGEGSDIYDLLFLRFERGPLGVLLFKLGVFTRGQLGLIDIIFQYIHCDEIYEAINILSSMNWDTLGHQCFISMSAIVNHLLRQKLTPEREAQLETSLGTFYAPTRPLLDSTILEYRDQISKYARRFFHHLLRYQRFEKAFLLAVDVGARDLFMDIHYLALDKGELALAEVARKRASDIDAESITSGVELLGPLDRGDMLNEAFIGLSLAPQGEDSFPDNLPPSCPTHRHILQQRILNGSSNRQIIDRRNELEKDICSGFLMTNTCNAEDGELREDGREQEIRDGGSLKMIHFGLV

SEQ ID NO: 134 - protein, 746 aa, Homo sapiens
  WD REPEAT CONTAINING PLANAR CELL POLARITY EFFECTOR (WDPCP), HOMOLOG ISOFORM 2 <Accession No.: NP_056994.3>
MRREFCWDAYSKAAGSRASSPLPRQDRDSFCHQMSFCLTELHLWSLKNTLHIADRDIGIYQYYDKKDPPATEHGNLEKKQKLAESRDYPWTLKNRRPEKLRDSLKELEELMQNSRCVLSKWKNKYVCQLLFGSGVLVSLSLSGPQLEKVVIDRSLVGKLISDTISDALLTDSFIILSFLAQNKLCFIQFTKKMESSDVNKRLEKLSALDYKIFYYEIPGPINKTTERHLAINCVHDRVVCWWPLVNDDAWPWAPISSEKDRANLLLLGYAQGRLEVLSSVRTEWDPLDVRFGTKQPYQVFTVEHSVSVDKEPMADSCIYECIRNKIQCVSVTRIPLKSKAISCCRNVTEDKLILGCEDSSLILYETHRRVTLLAQTELLPSLISCHPSGAILLVGSNQGELQIFDMALSPINIQLLAEDRLPRETLQFSKLFDASSSLVQMQWIAPQVVSQKGEGSDIYDLLFLRFERGPLGVLLFKLGVFTRGQLGLIDIIFQYIHCDEIYEAINILSSMNWDTLGHQCFISMSAIVNHLLRQKLTPEREAQLETSLGTFYAPTRPLLDSTILEYRDQISKYARRFFHHLLRYQRFEKAFLLAVDVGARDLFMDIHYLALDKGELALAEVARKRASDIDAESITSGVELLGPLDRGDMLNEAFIGLSLAPQGEDSFPDNLPPSCPTHRHILQQRILNGSSNRQIIDRRNELEKDICSGFLMTNTCNAEDGELREDGREQEIRDGGSLKMIHFGLV

SEQ ID NO: 135 - protein, 722 aa, Homo sapiens
  WD REPEAT CONTAINING PLANAR CELL POLARITY EFFECTOR (WDPCP), HOMOLOG ISOFORM 3 <Accession No.: NP_001340973.1>
MDRDSFCHQMSFCLTELHLWSLKNTLHIADRDIGIYQYYDKKDPPATEHGNLEKKQKLAESRDYPWTLKNRRPEKLRDSLKELEELMQNSRCVLSKWKNKYVCQLLFGSGVLVSLSLSGPQLEKVVIDRSLVGKLISDTISDALLTDSFIILSFLAQNKLCFIQFTKKMESSDVNKRLEKLSALDYKIFYYEIPGPINKTTERHLAINCVHDRVVCWWPLVNDDAWPWAPISSEKDRANLLLLGYAQGRLEVLSSVRTEWDPLDVRFGTKQPYQVFTVEHSVSVDKEPMADSCIYECIRNKIQCVSVTRIPLKSKAISCCRNVTEDKLILGCEDSSLILYETHRRVTLLAQTELLPSLISCHPSGAILLVGSNQGELQIFDMALSPINIQLLAEDRLPRETLQFSKLFDASSSLVQMQWIAPQVVSQKGEGSDIYDLLFLRFERGPLGVLLFKLGVFTRGQLGLIDIIFQYIHCDEIYEAINILSSMNWDTLGHQCFISMSAIVNHLLRQKLTPEREAQLETSLGTFYAPTRPLLDSTILEYRDQISKYARRFFHHLLRYQRFEKAFLLAVDVGARDLFMDIHYLALDKGELALAEVARKRASDIDAESITSGVELLGPLDRGDMLNEAFIGLSLAPQGEDSFPDNLPPSCPTHRHILQQRILNGSSNRQIIDRRNELEKDICSGFLMTNTCNAEDGELREDGREQEIRDGGSLKMIHFGLV

SEQ ID NO: 136 - protein, 649 aa, Homo sapiens
  WD REPEAT CONTAINING PLANAR CELL POLARITY EFFECTOR (WDPCP), HOMOLOG ISOFORM 4 <Accession No.: NP_001340974.1>
MRREFCWDAYSKAAGSRASSPLPRQDRDSFCHQMSFCLTELHLWSLKNTLHIADRDIGIYQYYDKKDPPATEHGNLEKKQKLAESRDYPWTLKNRRPEKLRDSLKELEELMQNSRCVLSKWKNKYVCQLLFGSGVLVSLSLSGPQLEKVVIDRSLVGKLISDTISDALLTDSFIILSFLAQNKLCFIQFTKKMESSDVNKRLEKLSALDYKIFYYEIPGPINKTTERHLAINCVHDRVVCWWPLVNDDAWPWAPISSEKDRANLLLLGYAQGRLEVLSSVRTEWDPLDVRFGTKQPYQVFTVEHSVSVDKEPMADSCIYECIRNKIQCVSVTRIPLKSKAISCCRNVTEDKLILGCEDSSLILYETHRRVTLLAQTELLPSLISCHPSGAILLVGSNQGELQIFDMALSPINIQLLAEDRLPRETLQFSKLFDASSSLVQMQWIAPQVVSQKGEGSDIYDLLFLRFERGPLGVLLFKLGVFTRGQLGLIDIIFQYIHCDEIYEAINILSSMNWDTLGHQCFISMSAIVNHLLRQKLTPEREAQLETSLGTFYAPTRPLLDSTILEYRDQISKYARRFFHHLLRWSLALSPRLECSDVIAVHCHLHLLGSSDSSASASRVAGTTGMCHHTQLIFVVFSRDGISPCWPGWS

SEQ ID NO: 137 - protein, 713 aa, Homo sapiens
  SEROLOGICALLY DEFINED COLON CANCER ANTIGEN 8 (SDCCAG8) <Accession No.: Q86SQ7.1>
MAKSPENSTLEEILGQYQRSLREHASRSIHQLTCALKEGDVTIGEDAPNLSFSTSVGNEDARTAWPELQQSHAVNQLKDLLRQQADKESEVSPSRRRKMSPLRSLEHEETNMPTMHDLVHTINDQSQYIHHLEAEVKFCKEELSGMKNKIQVVVLENEGLQQQLKSQRQEETLREQTLLDASGNMHNSWITTGEDSGVGETSKRPFSHDNADFGKAASAGEQLELEKLKLTYEEKCEIEESQLKFLRNDLAEYQRTCEDLKEQLKHKEFLLAANTCNRVGGLCLKCAQHEAVLSQTHTNVHMQTIERLVKERDDLMSALVSVRSSLADTQQREASAYEQVKQVLQISEEANFEKTKALIQCDQLRKELERQAERLEKELASQQEKRAIEKDMMKKEITKEREYMGSKMLILSQNIAQLEAQVEKVTKEKISAINQLEEIQSQLASREMDVTKVCGEMRYQLNKTNMEKDEAEKEHREFRAKTNRDLEIKDQEIEKLRIELDESKQHLEQEQQKAALAREECLRLTELLGESEHQLHLTRQEKDSIQQSFSKEAKAQALQAQQREQELTQKIQQMEAQHDKTENEQYLLLTSQNTFLTKLKEECCTLAKKLEQISQKTRSEIAQLSQEKRYTYDKLGKLQRRNEELEEQCVQHGRVHETMKQRLRQLDKHSQATAQQLVQLLSKQNQLLLERQSLSEEVDRLRTQLPSMPQSDC

SEQ ID NO: 138 - protein, 299 aa, Homo sapiens
  LEUCINE ZIPPER TRANSCRIPTION FACTOR LIKE 1 (LZTFL1) <Accession No.: CAB95836.1>
MAELGLNEHHQNEVINYMRFARSKRGLRLKTVDSCFQDLKESRLVEDTFTIDEVSEVLNGLQAVVHSEVESELINTAYTNVLLLRQLFAQAEKWYLKLQTDISELENRELLEQVAEFEKAEITSSNKKPILDVTKPKLAPLNEGGTAELLNKEILRLQEENEKLKSRLKTIEIQATNALDEKSKLEKALQDLQLDQGNQKDFIKAQDLSNLENTVAALKSEFQKTLNDKTENQKSLEENLATAKHDLLRVQEQLHMAEKELEKKFQQTAAYRNMKEILTKKNDQIKDLRKRLAQYEPED

SEQ ID NO: 139 - protein, 103 aa, Homo sapiens
  BBSOME INTERACTING PROTEIN 1 (BBIP1), ISOFORM 1 <Accession No.: NP_001182233.1>
MLKAAAKRPELSGLLKFNNYGILSESPLTSQRTTWLLYQSPSFIPGFAYPSRCLKTIGGVYKQARKKHYIQQLRYGRSEVNVPGSSSKARATVCGRYNDNGAV

SEQ ID NO: 140 - protein, 92 aa, Homo sapiens
  BBSOME INTERACTING PROTEIN 1 (BBIP1), ISOFORM 2 <Accession No.: NP_001182234.1>
MLKAAAKRPELSGKNTISNNSDMAEVKSMFREVLPKQGPLFVEDIMTMVLCKPKLLPLKSLTLEKLEKMHQAAQNTIRQQEMAEKDQRQITH

SEQ ID NO: 141 - protein, 186 aa, Homo sapiens
  INTRAFLAGELLAR TRANSPORT 27 (IFT27), HOMOLOG ISOFORM 1 <Accession No.: NP_001349932.1>
MVKLAAKCILAGDPAVGKTALAQIFRSDGAHFQKSYTLTTGMDLVVKTVPVPDTGDSVELFIFDSAGKELFSEMLDKLWESPNVLCLVYDVTNEESFNNCSKWLEKARSQAPGISLPGVLVGNKTDLAGRRAVDSAEARAWALGQGLECFETSVKEMENFEAPFHCLAKQFHQLYREKVEVFRALA

SEQ ID NO: 142 - protein, 185 aa, Homo sapiens
  INTRAFLAGELLAR TRANSPORT 27 (IFT27), HOMOLOG ISOFORM 2 <Accession No.: NP_006851.1>
MVKLAAKCILADPAVGKTALAQIFRSDGAHFQKSYTLTTGMDLVVKTVPVPDTGDSVELFIFDSAGKELFSEMLDKLWESPNVLCLVYDVTNEESFNNCSKWLEKARSQAPGISLPGVLVGNKTDLAGRRAVDSAEARAWALGQGLECFETSVKEMENFEAPFHCLAKQFHQLYREKVEVFRALA

SEQ ID NO: 143 - protein, 201 aa, Homo sapiens
  GUANYLATE CYCLASE ACTIVATOR 1A (GUCA1A) <Accession No.: EAX04084.1>
MGNVMEGKSVEELSSTECHQWYKKFMTECPSGQLTLYEFRQFFGLKNLSPSASQYVEQMFETFDFNKDGYIDFMEYVAALSLVLKGKVEQKLRWYFKLYDVDGNGCIDRDELLTIIQAIRAINPCSDTTMTAEEFTDTVFSKIDVNGDGELSLEEFIEGVQKDQMLLDTLTRSLDLTRIVRRLQNGEQDEEGADEAAEAAG

SEQ ID NO: 144 - protein, 276 aa, Homo sapiens
  OPA1 MITOCHONDRIAL DYNAMIN LIKE GTPASE (OPA1); <Accession No.: AAH58013.1>
MTEPKGKEHDDIFDKLKEAVKEESIKRHKWNDFAEDSLRVIQHNALEDRSISDKQQWDAAIYFMEEALQARLKDTENAIENMVGPDWKKRWLYWKNRTQEQCVHNETKNELEKMLKCNEEHPAYLASDEITTVRKNLESRGVEVDPSLIKDTWHQVYRRHFLKTALNHCNLCRRGFYYYQRHFVDSELECNDVVLFWRIQRMLAITANTLRQQLTNTEVRRLEKNVKEVLEDFAEDGEKKIKLLTGKRVQLAEDLKKVREIQEKLDAFIEALHQEK

SEQ ID NO: 145 - protein, 364 aa, Homo sapiens
  RP1 AXONEMAL MICROTUBULE ASSOCIATED (RP1) <Accession No.: AAA20120.1>
MQKWFSAFDDAIIQRQWRANPSRGGGGVSFTKEVDTNVATGAPPRRQRVPGRACPWREPIRGRRGARPGGGDAGGTPGETVRHCSAPEDPIFRFSSLHSYPFPGTIKSRDMSWKRHHLIPETFGVKRRRKRGPVESDPLRGEPGSARAAVSELMQLFPRGLFEDALPPIVLRSQVYSLVPDRTVADRQLKELQEQGEIRIVQLGFDLDAHGIIFTEDYRTRVLKACDGRPYAGAVQKFLASVLPACGDLSFQQDQMTQTFGFRDSEITHLVNAGVLTVRDAGSWWLAVPGAGRFIKYFVKGRQAVLSMVRKAKYRELLLSELLGRRAPVVVRLGLTYHVHDLIGAQLVDCISTTSGTLLRLPET

SEQ ID NO: 146 - protein, 350 aa, Homo sapiens
  RP2 ACTIVATOR OF ARL3 GTPASE (RP2) <Accession No.: ANZ79619.1>
MGCFFSKRRKADKESRPENEEERPKQYSWDQREKVDPKDYMFSGLKDETVGRLPGTVAGQQFLIQDCENCNIYIFDHSATVTIDDCTNCIIFLGPVKGSVFFRNCRDCKCTLACQQFRVRDCRKLEVFLCCATQPIIESSSNIKFGCFQWYYPELAFQFKDAGLSIFNNTWSNIHDFTPVSGELNWSLLPEDAVVQDYVPIPTTEELKAVRVSTEANRSIVPISRGQRQKSSDESCLVVLFAGDYTIANARKLIDEMVGKGFFLVQTKEVSMKAEDAQRVFREKAPDFLPLLNKGPVIALEFNGDGAVEVCQLIVNEIFNGTKMFVSESKETASGDVDSFYNFADIQMGI

SEQ ID NO: 147 - protein, 346 aa, Homo sapiens
  PERIPHERIN 2 (PRPH2) <Accession No.: NP_000313.2>
MALLKVKFDQKKRVKLAQGLWLMNWFSVLAGIIIFSLGLFLKIELRKRSDVMNNSESHFVPNSLIGMGVLSCVFNSLAGKICYDALDPAKYARWKPWLKPYLAICVLFNIILFLVALCCFLLRGSLENTLGQGLKNGMKYYRDTDTPGRCFMKKTIDMLQIEFKCCGNNGFRDWFEIQWISNRYLDFSSKEVKDRIKSNVDGRYLVDGVPFSCCNPSSPRPCIQYQITNNSAHYSYDHQTEELNLWVRGCRAALLSYYSSLMNSMGVVTLLIWLFEVTITIGLRYLQTSLDGVSNPEESESESQGWLLERSVPETWKAFLESVKKLGKGNQVEAEGADAGQAPEAG

SEQ ID NO: 148 - protein, 499 aa, Homo sapiens
  PRE-MRNA PROCESSING FACTOR 31(PRPF31) <Accession No.: AAI17390.1>
MSLADELLADLEEAAEEEEGGSYGEEEEEPAIEDVQEETQLDLSGDSVKTIAKLWDSKMFAEIMMKIEEYISKQAKASEVMGPVEAAPEYRVIVDANNLTVEIENELNIIHKFIRDKYSKRFPELESLVPNALDYIRTVKELGNSLDKCKNNENLQQILTNATIMVVSVTASTTQGQQLSEEELERLEEACDMALELNASKHRIYEYVESRMSFIAPNLSIIIGASTAAKIMGVAGGLTNLSKMPACNIMLLGAQRKTLSGFSSTSVLPHTGYIYHSDIVQSLPPDLRRKAARLVAAKCTLAARVDSFHESTEGKVGYELKDEIERKFDKWQEPPPVKQVKPLPAPLDGQRKKRGGRRYRKMKERLGLTEIRKQANRMSFGEIEEDAYQEDLGFSLGHLGKSGSGRVRQTQVNEATKARISKTLQRTLQKQSVVYGGKSTIRDRSSGTASSVAFTPLQGLEIVNPQAAEKKVAEANQKYFSSMAEFLKVKGEKSGLMST

SEQ ID NO: 149 - protein, 499 aa, Homo sapiens; identical to SEQ ID NO: 148
  PRE-MRNA PROCESSING FACTOR 31(PRPF31), ISOFORM CRA_A <Accession No.: EAW72190.1>

SEQ ID NO: 150 - protein, 300 aa, Homo sapiens
  PRE-MRNA PROCESSING FACTOR 31(PRPF31), ISOFORM CRA_A <Accession No.: EAW72191.1>
MFAEIMMKIEEYISKQAKASEVMGPVEAAPEYRVIVDANNLTVEIENELNIIHKFIRDKYSKRFPELESLVPNALDYIRTVKELGNSLDKCKNNENLQQILTNATIMVVSVTASTTQGQQLSEEELERLEEACDMALELNASKHRIYEYVESRMSFIAPNLSIIIGASTAAKIMGVAGGLTNLSKMPACNIMLLGAQRKTLSGFSSTSVLPHTGYIYHSDIVQSLPPDLRRKAARLVAAKCTLAARVDSFHESTEGKVGYELKDEIERKFDKWQEPPPVKQVKPLPAPLDGQRKKRGGRR

SEQ ID NO: 151 - protein, 2335 aa, Homo sapiens [sequence omitted]

SEQ ID NO: 152 - protein, 2145 aa, Homo sapiens
  PRE-MRNA PROCESSING FACTOR 8 (PRPF8), ISOFORM CRA_A <Accession No.: EAW90588.1>
MAGVFPYRGPGNPVPGPLAPLPDYMSEEKLQEKARKWQQLQAKRYAEKRKFGFVDAQKEDMPPEHVRKIIRDHGDMTNRKFRHDKRVYLGALKYMPHAVLKLLENMPMPWEQIRDVPVLYHITGAISFVNEIPWVIEPVYISQWGSMWIMMRREKRDRRHFKRMRFPPFDDEEPPLDYADNILDVEPLEAIQLELDPEEDAPVLDWFYDHQPLRDSRKYVNGSTYQRWQFTLPMMSTLYRLANQLLTDLVDDNYFYLFDLKAFFTSKALNMAIPGGPKFEPLVRDINLQDEDWNEFNDINKIIIRQPIRTEYKIAFPYLYNNLPHHVHLTWYHTPNVVFIKTEDPDLPAFYFDPLINPISHRHSVKSQEPLPDDDEEFELPEFVEPFLKDTPLYTDNTANGIALLWAPRPFNLRSGRTRRALDIPLVKNWYREHCPAGQPVKVRVSYQKLLKYYVLNALKHRPPKAQKKRYLFRSFKATKFFQSTKLDWVEVGLQVCRQGYNMLNLLIHRKNLNYLHLDYNFNLKPVKTLTTKERKKSRFGNAFHLCREVLRLTKLVVDSHVQYRLGNVDAFQLADGLQYIFAHVGQLTGMYRYKYKLMRQIRMCKDLKHLIYYRFNTGPVGKGPGCGFWAAGWRVWLFFMRGITPLLERWLGNLLARQFEGRHSKGVAKTVTKQRVESHFDLELRAAVMHDILDMMPEGIKQNKARTILQHLSEAWRCWKANIPWKVPGLPTPIENMILRYVKAKADWWTNTAHYNRERIRRGATVDKTVCKKNLGRLTRLYLKAEQERQHNYLKDGPYITAEEAVAVYTTTVHWLESRRFSPIPFPPLSYKHDTKLLILALERLKEAYSVKSRLNQSQREELGLIEQAYDNPHEALSRIKRHLLTQRAFKEVGIEFMDLYSHLVPVYDVEPLEKITDAYLDQYLWYEADKRRLFPPWIKPADTEPPPLLVYKWCQGINNLQDVWETSEGECNVMLESRFEKMYEKIDLTLLNRLLRLIVDHNIADYMTAKNNVVINYKDMNHTNSYGIIRGLQFASFIVQYYGLVMDLLVLGLHRASEMAGPPQMPNDFLSFQDIATEAAHPIRLFCRYIDRIHIFFRFTADEARDLIQRYLTEHPDPNNENIVGYNNKKCWPRDARMRLMKHDVNLGRAVFWDIKNRLPRSVTTVQWENSFVSVYSKDNPNLLFNMCGFECRILPKCRTSYEEFTHKDGVWNLQNEVTKERTAQCFLRVDDESMQRFHNRVRQILMASGSTTFTKIVNKWNTALIGLMTYFREAVVNTQELLDLLVKCENKIQTRIKIGLNSKMPSRFPPVVFYTPKELGGLGMLSMGHVLIPQSDLRWSKQTDVGITHFRSGMSHEEDQLIPNLYRYIQPWESEFIDSQRVWAEYALKRQEAIAQNRRLTLEDLEDSWDRGIPRINTLFQKDRHTLAYDKGWRVRTDFKQYQVLKQNPFWWTHQRHDGKLWNLNNYRTDMIQALGGVEGILEHTLFKGTYFPTWEGLFWEKASGFEESMKWKKLTNAQRSGLNQIPNRRFTLWWSPTINRANVYVGFQVQLDLTGIFMHGKIPTLKISLIQIFRAHLWQKIHESIVMDLCQVFDQELDALEIETVQKETIHPRKSYKMNSSCADILLFASYKWNVSRPSLLADSKDVMDSTTTQKYWIDIQLRWGDYDSHDIERYARAKFLDYTTDNMSIYPSPTGVLIAIDLAYNLHSAYGNWFPGSKPLIQQAMAKIMKANPALYVLRERIRKGLQLYSSEPTEPYLSSQNYGELFSNQIIWFVDDTNVYRVTIHKTFEGNLTTKPINGAIFIFNPRTGQLFLKIIHTSVWAGQKRLGQLAKWKTAEEVAALIRSLPVEEQPKQIIVTRKGMLDPLEVHLLDFPNIVIKGSELQLPFQACLKVEKFGDLILKATEPQMVLFNLYDDWLKTISSYTAFSRLILILRALHVNNDRAKVILKPDKTTITEPHHIWPTLTDEEWIKVEVQLKDLILADYGKKNNVNVASLTQSEIRDIILGMEISAPSQQRQQIAEIEKQTKEQSQLTATQTRTVNKHGDEIITSTTSNYETQTFSSKTEWRVRAISAANLHLRTNHIYVSSDDIKETGYTYILPKNVLKKFICISDLRAQVSKWTQLGHSVCPTHFVPKTQT

SEQ ID NO: 153 - protein, 2335 aa, Homo sapiens [sequence omitted]

SEQ ID NO: 154 - protein, 103 aa, Homo sapiens [sequence omitted]

SEQ ID NO: 155 - protein, 1525 aa, Homo sapiens
  PRE-MRNA PROCESSING FACTOR 8 (PRPF8), ISOFORM CRA_D <Accession No.: EAW90591.1>
MAGVFPYRGPGNPVPGPLAPLPDYMSEEKLQEKARKWQQLQAKRYAEKRKFGFVDAQKEDMPPEHVRKIIRDHGDMTNRKFRHDKRVYLGALKYMPHAVLKLLENMPMPWEQIRDVPVLYHITGAISFVNEIPWVIEPVYISQWGSMWIMMRREKRDRRHFKRMRFPPFDDEEPPLDYADNILDVEPLEAIQLELDPEEDAPVLDWFYDHQPLRDSRKYVNGSTYQRWQFTLPMMSTLYRLANQLLTDLVDDNYFYLFDLKAFFTSKALNMAIPGGPKFEPLVRDINLQDEDWNEFNDINKIIIRQPIRTEYKIAFPYLYNNLPHHVHLTWYHTPNVVFIKTEDPDLPAFYFDPLINPISHRHSVKSQEPLPDDDEEFELPEFVEPFLKDTPLYTDNTANGIALLWAPRPFNLRSGRTRRALDIPLVKNWYREHCPAGQPVKVRVSYQKLLKYYVLNALKHRPPKAQKKRYLFRSFKATKFFQSTKLDWVEVGLQVCRQGYNMLNLLIHRKNLNYLHLDYNFNLKPVKTLTTKERKKSRFGNAFHLCREVLRLTKLVVDSHVQYRLGNVDAFQLADGLQYIFAHVGQLTGMYRYKYKLMRQIRMCKDLKHLIYYRFNTGPVGKGPGCGFWAAGWRVWLFFMRGITPLLERWLGNLLARQFEGRHSKGVAKTVTKQRVESHFDLELRAAVMHDILDMMPEGIKQNKARTILQHLSEAWRCWKANIPWKVPGLPTPIENMILRYVKAKADWWTNTAHYNRERIRRGATVDKTVCKKNLGRLTRLYLKAEQERQHNYLKDGPYITAEEAVAVYTTTVHWLESRRFSPIPFPPLSYKHDTKLLILALERLKEAYSVKSRLNQSQREELGLIEQAYDNPHEALSRIKRHLLTQRAFKEVGIEFMDLYSHLVPVYDVEPLEKITDAYLDQYLWYEADKRRLFPPWIKPADTEPPPLLVYKWCQGINNLQDVWETSEGECNVMLESRFEKMYEKIDLTLLNRLLRLIVDHNIADYMTAKNNVVINYKDMNHTNSYGIIRGLQFASFIVQYYGLVMDLLVLGLHRASEMAGPPQMPNDFLSFQDIATEAAHPIRLFCRYIDRIHIFFRFTADEARDLIQRYLTEHPDPNNENIVGYNNKKCWPRDARMRLMKHDVNLGRAVFWDIKNRLPRSVTTVQWENSFVSVYSKDNPNLLFNMCGFECRILPKCRTSYEEFTHKDGVWNLQNEVTKERTAQCFLRVDDESMQRFHNRVRQILMASGSTTFTKIVNKWNTALIGLMTYFREAVVNTQELLDLLVKCENKIQTRIKIGLNSKMPSRFPPVVFYTPKELGGLGMLSMGHVLIPQSDLRWSKQTDVGITHFRSGMSHEEDQLIPNLYRYIQPWESEFIDSQRVWAEYALKRQEAIAQNRRLTLEDLEDSWDRGIPRINTLFQKDRHTLAYDKGWRVRTDFKQYQVLKQNPFWWTHQRHDGKLWNLNNYRTDMIQALGGVEGILEHTLFKGTYFPTCEQRSGKSDPEARQDYYYRTTPHLAHSD

SEQ ID NO: 156 - protein, 132 aa, Homo sapiens
  PRE-MRNA PROCESSING FACTOR 8 (PRPF8), ISOFORM CRA_E <Accession No.: EAW90592.1>
MEISAPSQQRQQIAEIEKQTKEQSQLTATQTRTVNKHGDEIITSTTSNYETQTFSSKTEWRVRAISAANLHLRTNHIYVSSDDIKETGYTYILPKNVLKKFICISDLRAQVSKWTQLGHSVCPTHFVPKTQT

SEQ ID NO: 157 - protein, 2335 aa, Homo sapiens
  PRE-MRNA PROCESSING FACTOR 8 (PRPF8), ISOFORM CRA_F <Accession No.: EAW90593.1>
MAGVFPYRGPGNPVPGPLAPLPDYMSEEKLQEKARKWQQLQAKRYAEKRKFGFVDAQKEDMPPEHVRKIIRDHGDMTNRKFRHDKRVYLGALKYMPHAVLKLLENMPMPWEQIRDVPVLYHITGAISFVNEIPWVIEPVYISQWGSMWIMMRREKRDRRHFKRMRFPPFDDEEPPLDYADNILDVEPLEAIQLELDPEEDAPVLDWFYDHQPLRDSRKYVNGSTYQRWQFTLPMMSTLYRLANQLLTDLVDDNYFYLFDLKAFFTSKALNMAIPGGPKFEPLVRDINLQDEDWNEFNDINKIIIRQPIRTEYKIAFPYLYNNLPHHVHLTWYHTPNVVFIKTEDPDLPAFYFDPLINPISHRHSVKSQEPLPDDDEEFELPEFVEPFLKDTPLYTDNTANGIALLWAPRPFNLRSGRTRRALDIPLVKNWYREHCPAGQPVKVRVSYQKLLKYYVLNALKHRPPKAQKKRYLFRSFKATKFFQSTKLDWVEVGLQVCRQGYNMLNLLIHRKNLNYLHLDYNFNLKPVKTLTTKERKKSRFGNAFHLCREVLRLTKLVVDSHVQYRLGNVDAFQLADGLQYIFAHVGQLTGMYRYKYKLMRQIRMCKDLKHLIYYRFNTGPVGKGPGCGFWAAGWRVWLFFMRGITPLLERWLGNLLARQFEGRHSKGVAKTVTKQRVESHFDLELRAAVMHDILDMMPEGIKQNKARTILQHLSEAWRCWKANIPWKVPGLPTPIENMILRYVKAKADWWTNTAHYNRERIRRGATVDKTVCKKNLGRLTRLYLKAEQERQHNYLKDGPYITAEEAVAVYTTTVHWLESRRFSPIPFPPLSYKHDTKLLILALERLKEAYSVKSRLNQSQREELGLIEQAYDNPHEALSRIKRHLLTQRAFKEVGIEFMDLYSHLVPVYDVEPLEKITDAYLDQYLWYEADKRRLFPPWIKPADTEPPPLLVYKWCQGINNLQDVWETSEGECNVMLESRFEKMYEKIDLTLLNRLLRLIVDHNIADYMTAKNNVVINYKDMNHTNSYGIIRGLQFASFIVQYYGLVMDLLVLGLHRASEMAGPPQMPNDFLSFQDIATEAAHPIRLFCRYIDRIHIFFRFTADEARDLIQRYLTEHPDPNNENIVGYNNKKCWPRDARMRLMKHDVNLGRAVFWDIKNRLPRSVTTVQWENSFVSVYSKDNPNLLFNMCGFECRILPKCRTSYEEFTHKDGVWNLQNEVTKERTAQCFLRVDDESMQRFHNRVRQILMASGSTTFTKIVNKWNTALIGLMTYFREAVVNTQELLDLLVKCENKIQTRIKIGLNSKMPSRFPPVVFYTPKELGGLGMLSMGHVLIPQSDLRWSKQTDVGITHFRSGMSHEEDQLIPNLYRYIQPWESEFIDSQRVWAEYALKRQEAIAQNRRLTLEDLEDSWDRGIPRINTLFQKDRHTLAYDKGWRVRTDFKQYQVLKQNPFWWTHQRHDGKLWNLNNYRTDMIQALGGVEGILEHTLFKGTYFPTWEGLFWEKASGFEESMKWKKLTNAQRSGLNQIPNRRFTLWWSPTINRANVYVGFQVQLDLTGIFMHGKIPTLKISLIQIFRAHLWQKIHESIVMDLCQVFDQELDALEIETVQKETIHPRKSYKMNSSCADILLFASYKWNVSRPSLLADSKDVMDSTTTQKYWIDIQLRWGDYDSHDIERYARAKFLDYTTDNMSIYPSPTGVLIAIDLAYNLHSAYGNWFPGSKPLIQQAMAKIMKANPALYVLRERIRKGLQLYSSEPTEPYLSSQNYGELFSNQIIWFVDDTNVYRVTIHKTFEGNLTTKPINGAIFIFNPRTGQLFLKIIHTSVWAGQKRLGQLAKWKTAEEVAALIRSLPVEEQPKQIIVTRKGMLDPLEVHLLDFPNIVIKGSELQLPFQACLKVEKFGDLILKATEPQMVLFNLYDDWLKTISSYTAFSRLILILRALHVNNDRAKVILKPDKTTITEPHHIWPTLTDEEWIKVEVQLKDLILADYGKKNNVNVASLTQSEIRDIILGMEISAPSQQRQQIAEIEKQTKEQSQLTATQTRTVNKHGDEIITSTTSNYETQTFSSKTEWRVRAISAANLHLRTNHIYVSSDDIKETGYTYILPKNVLKKFICISDLRAQIAGYLYGVSPPDNPQVKEIRCIVMVPQWGTHQTVHLPGQLPQHEYLKEMEPLGWIHTQPNESPQLSPQDVTTHAKIMADNPSWDGEKTIIITCSFTPGSCTLTAYKLTPSGYEWGRQNTDKGNNPKGYLPSHYERVQMLLSDRFLGFFMVPAQSSWNYNFMGVRHDPNMKYELQLANPKEFYHEVHRPSHFLNFALLQEGEVYSADREDLYA

SEQ ID NO: 158 - protein, 268 aa, Homo sapiens
  PRE-MRNA PROCESSING FACTOR 8 (PRPF8), ISOFORM CRA_G <Accession No.: EAW90594.1>
MAGVFPYRGPGNPVPGPLAPLPDYMSEEKLQEKARKWQQLQAKRYAEKRKFGFVDAQKEDMPPEHVRKIIRDHGDMTNRKFRHDKRVYLGALKYMPHAVLKLLENMPMPWEQIRDVPVLYHITGAISFVNEIPWVIEPVYISQWGSMWIMMRREKRDRRHFKRMRFPPFDDEEPPLDYADNILDVEPLEAIQLELDPEEDAPVLDWFYDHQPLRDSRKYVNGSTYQRWQFTLPMMMSPPMPRSWLTTHLGMARRPLSSHAASRQAPVH

SEQ ID NO: 159 - protein, 3165 aa, Homo sapiens [sequence omitted]

SEQ ID NO: 160 - protein, 716 aa, Homo sapiens
  FAM161 CENTROSOMAL PROTEIN A (FAM161A), ISOFORM 1 <Accession No.: NP_001188472.1>
MATSHRVAKLVASSLQTPVNPITGARVAQYEREDPLKALAAAEAILEDEEEEKVAQPAGASADLNTSFSGVDEHAPISYEDFVNFPDIHHSNEEYFKKVEELKAAHIETMAKLEKMYQDKLHLKEVQPVVIREDSLSDSSRSVSEKNSYHPVSLMTSFSEPDLGQSSSLYVSSSEEELPNLEKEYPRKNRMMTYAKELINNMWTDFCVEDYIRCKDTGFHAAEKRRKKRKEWVPTITVPEPFQMMIREQKKKEESMKSKSDIEMVHKALKKQEEDPEYKKKFRANPVPASVFLPLYHDLVKQKEERRRSLKEKSKEALLASQKPFKFIAREEQKRAAREKQLRDFLKYKKKTNRFKARPIPRSTYGSTTNDKLKEEELYRNLRTQLRAQEHLQNSSPLPCRSACGCRNPRCPEQAVKLKCKHKVRCPTPDFEDLPERYQKHLSEHKSPKLLTVCKPFDLHASPHASIKREKILADIEADEENLKETRWPYLSPRRKSPVRCAGVNPVPCNCNPPVPTVSSRGREQAVRRSLEEKKMLEEERNRILTKQKQRMKELQKLLTTRAKAYDSHQSLAQISKSRVKCLRKSEKERMREYQRELEEREEKLKKRPLLFERVAQKNARMAAEKHYSNTLKALGISDEFVSKKGQSGKVLEYFNNQETKSVTEDKESFNEEEKIEERENGEENYFIDTNSQDSYKEKDEANEESEEEKSVEESH

SEQ ID NO: 161 - protein, 660 aa, Homo sapiens
  FAM161 CENTROSOMAL PROTEIN A (FAM161A), ISOFORM 2 <Accession No.: NP_115556.2>
MATSHRVAKLVASSLQTPVNPITGARVAQYEREDPLKALAAAEAILEDEEEEKVAQPAGASADLNTSFSGVDEHAPISYEDFVNFPDIHHSNEEYFKKVEELKAAHIETMAKLEKMYQDKLHLKEVQPVVIREDSLSDSSRSVSEKNSYHPVSLMTSFSEPDLGQSSSLYVSSSEEELPNLEKEYPRKNRMMTYAKELINNMWTDFCVEDYIRCKDTGFHAAEKRRKKRKEWVPTITVPEPFQMMIREQKKKEESMKSKSDIEMVHKALKKQEEDPEYKKKFRANPVPASVFLPLYHDLVKQKEERRRSLKEKSKEALLASQKPFKFIAREEQKRAAREKQLRDFLKYKKKTNRFKARPIPRSTYGSTTNDKLKEEELYRNLRTQLRAQEHLQNSSPLPCRSACGCRNPRCPEQAVKLKCKHKVRCPTPDFEDLPERYQKHLSEHKSPKLLTVCKPFDLHASPHASIKREKILADIEADEENLKETRWPYLSPRRKSPVRCAGVNPVPCNCNPPVPTVSSRGREQAVRKSEKERMREYQRELEEREEKLKKRPLLFERVAQKNARMAAEKHYSNTLKALGISDEFVSKKGQSGKVLEYFNNQETKSVTEDKESFNEEEKIEERENGEENYFIDTNSQDSYKEKDEANEESEEEKSVEESH

SEQ ID NO: 162 - protein, 999 aa, Homo sapiens
  MER PROTO-ONCOGENE, TYROSINE KINASE (MERTK); <Accession No.: Q12866.2>
MGPAPLPLLLGLFLPALWRRAITEAREEAKPYPLFPGPFPGSLQTDHTPLLSLPHASGYQPALMFSPTQPGRPHTGNVAIPQVTSVESKPLPPLAFKHTVGHIILSEHKGVKFNCSISVPNIYQDTTISWWKDGKELLGAHHAITQFYPDDEVTAIIASFSITSVQRSDNGSYICKMKINNEEIVSDPIYIEVQGLPHFTKQPESMNVTRNTAFNLTCQAVGPPEPVNIFWVQNSSRVNEQPEKSPSVLTVPGLTEMAVFSCEAHNDKGLTVSKGVQINIKAIPSPPTEVSIRNSTAHSILISWVPGFDGYSPFRNCSIQVKEADPLSNGSVMIFNTSALPHLYQIKQLQALANYSIGVSCMNEIGWSAVSPWILASTTEGAPSVAPLNVTVFLNESSDNVDIRWMKPPTKQQDGELVGYRISHVWQSAGISKELLEEVGQNGSRARISVQVHNATCTVRIAAVTRGGVGPFSDPVKIFIPAHGWVDYAPSSTPAPGNADPVLIIFGCFCGFILIGLILYISLAIRKRVQETKFGNAFTEEDSELVVNYIAKKSFCRRAIELTLHSLGVSEELQNKLEDVVIDRNLLILGKILGEGEFGSVMEGNLKQEDGTSLKVAVKTMKLDNSSQREIEEFLSEAACMKDFSHPNVIRLLGVCIEMSSQGIPKPMVILPFMKYGDLHTYLLYSRLETGPKHIPLQTLLKFMVDIALGMEYLSNRNFLHRDLAARNCMLRDDMTVCVADFGLSKKIYSGDYYRQGRIAKMPVKWIAIESLADRVYTSKSDVWAFGVTMWEIATRGMTPYPGVQNHEMYDYLLHGHRLKQPEDCLDELYEIMYSCWRTDPLDRPTFSVLRLQLEKLLESLPDVRNQADVIYVNTQLLESSEGLAQGSTLAPLDLNIDPDSIIASCTPRAAISVVTAEVHDSKPHEGRYILNGGSEEWEDLTSAPSAAVTAEKNSVLPGERLVRNGVSWSHSSMLPLGSSLPDELLFADDSSEGSEVLM

SEQ ID NO: 163 - protein, 853 aa, Homo sapiens
  PHOSPHODIESTERASE 6B (PDE6B) <Accession No.: AAH00249.1>
MSLSEEQARSFLDQNPDFARQYFGKKLSPENVAAACEDGCPPDCDSLRDLCQVEESTALLELVQDMQESINMERVVFKVLRRLCTLLQADRCSLFMYRQRNGVAELATRLFSVQPDSVLEDCLVPPDSEIVFPLDIGVVGHVAQTKKMVNVEDVAECPHFSSFADELTDYKTKNMLATPIMNGKDVVAVIMAVNKLNGPFFTSEDEDVFLKYLNFATLYLKIYHLSYLHNCETRRGQVLLWSANKVFEELTDIERQFHKAFYTVRAYLNCERYSVGLLDMTKEKEFFDVWSVLMGESQPYSGPRTPDGREIVFYKVIDYILHGKEEIKVIPTPSADHWALASGLPSYVAESGFICNIMNASADEMFKFQEGALDDSGWLIKNVLSMPIVNKKEEIVGVATFYNRKDGKPFDEQDEVLMESLTQFLGWSVMNTDTYDKMNKLENRKDIAQDMVLYHVKCDRDEIQLILPTRARLGKEPADCDEDELGEILKEELPGPTTFDIYEFHFSDLECTELDLVKCGIQMYYELGVVRKFQIPQEVLVRFLFSISKGYRRITYHNWRHGFNVAQTMFTLLMTGKLKSYYTDLEAFAMVTAGLCHDIDHRGTNNLYQMKSQNPLAKLHGSSILERHHLEFGKFLLSEETLNIYQNLNRRQHDHVIHLMDIAIIATDLALYFKKRAMFQKIVDESKNYQDKKSWVEYLSLETTRKEIVMAMMMTACDLSAITKPWEVQSKVALLVAAEFWEQGDLERTVLDQQPIPMMDRNKAAELPKLQVGFIDFVCTFVYKEFSRFHEEILPMFDRLQNNRKEWKALADEYEAKVKALEEKEEEERVAAKKGTEICNGGPAPKSSTCCIL

SEQ ID NO: 164 - protein, 803 aa, Homo sapiens [sequence omitted]

SEQ ID NO: 165 - protein, 640 aa, Homo sapiens [sequence omitted]

SEQ ID NO: 166 - protein, 865 aa, Homo sapiens
  PROMININ 1 (PROM1) <Accession No.: O43490.1>
MALVLGSLLLLGLCGNSFSGGQPSSTDAPKAWNYELPATNYETQDSHKAGPIGILFELVHIFLYVVQPRDFPEDTLRKFLQKAYESKIDYDKPETVILGLKIVYYEAGIILCCVLGLLFIILMPLVGYFFCMCRCCNKCGGEMHQRQKENGPFLRKCFAISLLVICIIISIGIFYGFVANHQVRTRIKRSRKLADSNFKDLRTLLNETPEQIKYILAQYNTTKDKAFTDLNSINSVLGGGILDRLRPNIIPVLDEIKSMATAIKETKEALENMNSTLKSLHQQSTQLSSSLTSVKTSLRSSLNDPLCLVHPSSETCNSIRLSLSQLNSNPELRQLPPVDAELDNVNNVLRTDLDGLVQQGYQSLNDIPDRVQRQTTTVVAGIKRVLNSIGSDIDNVTQRLPIQDILSAFSVYVNNTESYIHRNLPTLEEYDSYWWLGGLVICSLLTLIVIFYYLGLLCGVCGYDRHATPTTRGCVSNTGGVFLMVGVGLSFLFCWILMIIVVLTFVFGANVEKLICEPYTSKELFRVLDTPYLLNEDWEYYLSGKLFNKSKMKLTFEQVYSDCKKNRGTYGTLHLQNSFNISEHLNINEHTGSISSELESLKVNLNIFLLGAAGRKNLQDFAACGIDRMNYDSYLAQTGKSPAGVNLLSFAYDLEAKANSLPPGNLRNSLKRDAQTIKTIHQQRVLPIEQSLSTLYQSVKILQRTGNGLLERVTRILASLDFAQNFITNNTSSVIIEETKKYGRTIIGYFEHYLQWIEFSISEKVASCKPVATALDTAVDVFLCSYIIDPLNLFWFGIGKATVFLLPALIFAVKLAKYYRRMDSEDVYDDVETIPMKNMENGNNGYHKDHVYGIHNPVMTSPSQH

SEQ ID NO: 167 - protein, 856 aa, Homo sapiens
  PROMININ 1 (PROM1), ISOFORM CRA_A <Accession No.: EAW92750.1>
MALVLGSLLLLGLCGNSFSGGQPSSTDAPKAWNYELPATNYETQDSHKAGPIGILFELVHIFLYVVQPRDFPEDTLRKFLQKAYESKIDYDKIVYYEAGIILCCVLGLLFIILMPLVGYFFCMCRCCNKCGGEMHQRQKENGPFLRKCFAISLLVICIIISIGIFYGFVANHQVRTRIKRSRKLADSNFKDLRTLLNETPEQIKYILAQYNTTKDKAFTDLNSINSVLGGGILDRLRPNIIPVLDEIKSMATAIKETKEALENMNSTLKSLHQQSTQLSSSLTSVKTSLRSSLNDPLCLVHPSSETCNSIRLSLSQLNSNPELRQLPPVDAELDNVNNVLRTDLDGLVQQGYQSLNDIPDRVQRQTTTVVAGIKRVLNSIGSDIDNVTQRLPIQDILSAFSVYVNNTESYIHRNLPTLEEYDSYWWLGGLVICSLLTLIVIFYYLGLLCGVCGYDRHATPTTRGCVSNTGGVFLMVGVGLSFLFCWILMIIVVLTFVFGANVEKLICEPYTSKELFRVLDTPYLLNEDWEYYLSGKLFNKSKMKLTFEQVYSDCKKNRGTYGTLHLQNSFNISEHLNINEHTGSISSELESLKVNLNIFLLGAAGRKNLQDFAACGIDRMNYDSYLAQTGKSPAGVNLLSFAYDLEAKANSLPPGNLRNSLKRDAQTIKTIHQQRVLPIEQSLSTLYQSVKILQRTGNGLLERVTRILASLDFAQNFITNNTSSVIIEETKKYGRTIIGYFEHYLQWIEFSISEKVASCKPVATALDTAVDVFLCSYIIDPLNLFWFGIGKATVFLLPALIFAVKLAKYYRRMDSEDVYDDVETIPMKNMENGNNGYHKDHVYGIHNPVMTSPSQH

SEQ ID NO: 168 - protein, 81 aa, Homo sapiens
  PROMININ 1 (PROM1), ISOFORM CRA_B <Accession No.: EAW92751.1>
MFHLEMACKSNHRETCVTPSDKFKREREILREKCCSFKSGVVLTDANYGVQFNRVFCCIRININWSAANMSIIRLVSSVLK

SEQ ID NO: 169 - protein, 865 aa, Homo sapiens; identical to SEQ ID NO: 166
  PROMININ 1 (PROM1), ISOFORM CRA_C <Accession No.: EAW92752.1>

SEQ ID NO: 170 - protein, 860 aa, Homo sapiens
  PHOSPHODIESTERASE 6A (PDE6A) <Accession No.: AAH35909.1>
MGEVTAEEVEKFLDSNIGFAKQYYNLHYRAKLISDLLGAKEAAVDFSNYHSPSSMEESEIIFDLLRDFQENLQTEKCIFNVMKKLCFLLQADRMSLFMYRTRNGIAELATRLFNVHKDAVLEDCLVMPDQEIVFPLDMGIVGHVAHSKKIANVPNTEEDEHFCDFVDILTEYKTKNILASPIMNGKDVVAIIMAVNKVDGSHFTKRDEEILLKYLNFANLIMKVYHLSYLHNCETRRGQILLWSGSKVFEELTDIERQFHKALYTVRAFLNCDRYSVGLLDMTKQKEFFDVWPVLMGEVPPYSGPRTPDGREINFYKVIDYILHGKEDIKVIPNPPPDHWALVSGLPAYVAQNGLICNIMNAPAEDFFAFQKEPLDESGWMIKNVLSMPIVNKKEEIVGVATFYNRKDGKPFDEMDETLMESLTQFLGWSVLNPDTYESMNKLENRKDIFQDIVKYHVKCDNEEIQKILKTREVYGKEPWECEEEELAEILQAELPDADKYEINKFHFSDLPLTELELVKCGIQMYYELKVVDKFHIPQEALVRFMYSLSKGYRKITYHNWRHGFNVGQTMFSLLVTGKLKRYFTDLEALAMVTAAFCHDIDHRGTNNLYQMKSQNPLAKLHGSSILERHHLEFGKTLLRDESLNIFQNLNRRQHEHAIHMMDIAIIATDLALYFKKRTMFQKIVDQSKTYESEQEWTQYMMLEQTRKEIVMAMMMTACDLSAITKPWEVQSQVALLVAAEFWEQGDLERTVLQQNPIPMMDRNKADELPKLQVGFIDFVCTFVYKEFSRFHEEITPMLDGITNNRKEWKALADEYDAKMKVQEEKKQKQQSAKSAAAGNQPGGNPSPGGATTSKSCCIQ

SEQ ID NO: 171 - protein, 269 aa, Homo sapiens
  PHOSPHODIESTERASE 6A (PDE6A), ISOFORM CRA_A <Accession No.: EAW61756.1>
MVTAAFCHDIDHRGTNNLYQMKSQNPLAKLHGSSILERHHLEFGKTLLRDESLNIFQNLNRRQHEHAIHMMDIAIIATDLALYFKKRTMFQKIVDQSKTYESEQEWTQYMMLEQTRKEIVMAMMMTACDLSAITKPWEVQSQVALLVAAEFWEQGDLERTVLQQNPIPMMDRNKADELPKLQVGFIDFVCTFVYKEFSRFHEEITPMLDGITNNRKEWKALADEYDAKMKVQEEKKQKQQSAKSAAAGNQPGGNPSPGGATTSKSCCIQ

SEQ ID NO: 172 - protein, 860 aa, Homo sapiens; identical to SEQ ID NO: 170
  PHOSPHODIESTERASE 6A (PDE6A), ISOFORM CRA_B <Accession No.: EAW61757.1>

SEQ ID NO: 173 - protein, 1241 aa, Homo sapiens [sequence omitted]

SEQ ID NO: 174 - protein, 623 aa, Homo sapiens
  MALE GERM CELL ASSOCIATED KINASE (MAK) <Accession No.: AAN16405.1>
MNRYTTMRQLGDGTYGSVLMGKSNESGELVAIKRMKRKFYSWDECMNLREVKSLKKLNHANVIKLKEVIRENDHLYFIFEYMKENLYQLMKDRNKLFPESVIRNIMYQILQGLAFIHKHGFFHRDMKPENLLCMGPELVKIADFGLARELRSQPPYTDYVSTRWYRAPEVLLRSSVYSSPIDVWAVGSIMAELYMLRPLFPGTSEVDEIFKICQVLGTPKKSDWPEGYQLASSMNFRFPQCVPINLKTLIPNASNEAIQLMTEMLNWDPKKRPTASQALKHPYFQVGQVLGPSSNHLESKQSLNKQLQPLESKPSLVEVEPKPLPDIIDQVVGQPQPKTSQQPLQPIQPPQNLSVQQPPKQQSQEKPPQTLFPSIVKNMPTKPNGTLSHKSGRRRWGQTIFKSGDSWEELEDYDFGASHSKKPSMGVFKEKRKKDSPFRLPEPVPSGSNHSTGENKSLPAVTSLKSDSELSTAPTSKQYYLKQSRYLPGVNPKKVSLIASGKEINPHTWSNQLFPKSLGPVGAELAFKRSNAGNLGSYATYNQSGYIPSFLKKEVQSAGQRIHLAPLNATASEYTWNTKTGRGQFSGRTYNPTAKNLNIVNRAQPIPSVHGRTDWVAKYGGHR

SEQ ID NO: 175 - protein, 648 aa, Homo sapiens
  MALE GERM CELL ASSOCIATED KINASE (MAK); RETINAL-ENRICHED ISOFORM <Accession No.: AEL29206.1>
MNRYTTMRQLGDGTYGSVLMGKSNESGELVAIKRMKRKFYSWDECMNLREVKSLKKLNHANVIKLKEVIRENDHLYFIFEYMKENLYQLMKDRNKLFPESVIRNIMYQILQGLAFIHKHGFFHRDMKPENLLCMGPELVKIADFGLARELRSQPPYTDYVSTRWYRAPEVLLRSSVYSSPIDVWAVGSIMAELYMLRPLFPGTSEVDEIFKICQVLGTPKKSDWPEGYQLASSMNFRFPQCVPINLKTLIPNASNEAIQLMTEMLNWDPKKRPTASQALKHPYFQVGQVLGPSSNHLESKQSLNKQLQPLESKPSLVEVEPKPLPDIIDQVVGQPQPKTSQQPLQPIQPPQNLSVQQPPKQQSQEKPPQTLFPSIVKNMPTKPNGTLSHKSGRRRWGQTIFKSGDSWEELEDYDFGASHSKKPSMGVFKEKRKKDSPFRLPEPVPSGSNHSTGENKSLPAVTSLKSDSELSTAPTSKQYYLKQSRYLPGVNPKKVSLIASGKEINPHTWSNQLFPKSLGPVGAELAFKRSNAEESIIKPIEKLSCNETFPEKLEDPQGNLGSYATYNQSGYIPSFLKKEVQSAGQRIHLAPLNATASEYTWNTKTGRGQFSGRTYNPTAKNLNIVNRAQPIPSVHGRTDWVAKYGGHR

SEQ ID NO: 176 - protein, 1462 aa, Homo sapiens
  INTRAFLAGELLAR TRANSPORT 140 (IFT140) <Accession No.: NP_055529.2>
MALYYDHQIEAPDAAGSPSFISWHPVHPFLAVAYISTTSTGSVDIYLEQGECVPDTHVERPFRVASLCWHPTRLVLAVGWETGEVTVFNKQDKEQHTMPLTHTADITVLRWSPSGNCLLSGDRLGVLLLWRLDQRGRVQGTPLLKHEYGKHLTHCIFRLPPPGEDLVQLAKAAVSGDEKALDMFNWKKSSSGSLLKMGSHEGLLFFVSLMDGTVHYVDEKGKTTQVVSADSTIQMLFYMEKREALVVVTENLRLSLYTVPPEGKAEEVMKVKLSGKTGRRADIALIEGSLLVMAVGEAALRFWDIERGENYILSPDEKFGFEKGENMNCVCYCKVKGLLAAGTDRGRVAMWRKVPDFLGSPGAEGKDRWALQTPTELQGNITQIQWGSRKNLLAVNSVISVAILSERAMSSHFHQQVAAMQVSPSLLNVCFLSTGVAHSLRTDMHISGVFATKDAVAVWNGRQVAIFELSGAAIRSAGTFLCETPVLAMHEENVYTVESNRVQVRTWQGTVKQLLLFSETEGNPCFLDICGNFLVVGTDLAHFKSFDLSRREAKAHCSCRSLAELVPGVGGIASLRCSSSGSTISILPSKADNSPDSKICFYDVEMDTVTVFDFKTGQIDRRETLSFNEQETNKSHLFVDEGLKNYVPVNHFWDQSEPRLFVCEAVQETPRSQPQSANGQPQDGRAGPAADVLILSFFISEEHGFLLHESFPRPATSHSLLGMEVPYYYFTRKPEEADREDEVEPGCHHIPQMVSRRPLRDFVGLEDCDKATRDAMLHFSFFVTIGDMDEAFKSIKLIKSEAVWENMARMCVKTQRLDVAKVCLGNMGHARGARALREAEQEPELEARVAVLATQLGMLEDAEQLYRKCKRHDLLNKFYQAAGRWQEALQVAEHHDRVHLRSTYHRYAGHLEASADCSRALSYYEKSDTHRFEVPRMLSEDLPSLELYVNKMKDKTLWRWWAQYLESQGEMDAALHYYELARDHFSLVRIHCFQGNVQKAAQIANETGNLAASYHLARQYESQEEVGQAVHFYTRAQAFKNAIRLCKENGLDDQLMNLALLSSPEDMIEAARYYEEKGVQMDRAVMLYHKAGHFSKALELAFATQQFVALQLIAEDLDETSDPALLARCSDFFIEHSQYERAVELLLAARKYQEALQLCLGQNMSITEEMAEKMTVAKDSSDLPEESRRELLEQIADCCMRQGSYHLATKKYTQAGNKLKAMRALLKSGDTEKITFFASVSRQKEIYIMAANYLQSLDWRKEPEIMKNIIGFYTKGRALDLLAGFYDACAQVEIDEYQNYDKAHGALTEAYKCLAKAKAKSPLDQETRLAQLQSRMALVKRFIQARRTYTEDPKESIKQCELLLEEPDLDSTIRIGDVYGFLVEHYVRKEEYQTAYRFLEEMRRRLPLANMSYYVSPQAVDAVHRGLGLPLPRTVPEQVRHNSMEDARELDEEVVEEADDDP

SEQ ID NO: 177 - protein, 480 aa, Homo sapiens
  HTRA SERINE PEPTIDASE 1 (HTRA1) <Accession No.: EAW49312.1>
MQIPRAALLPLLLLLLAAPASAQLSRAGRSAPLAAGCPDRCEPARCPPQPEHCEGGRARDACGCCEVCGAPEGAACGLQEGPCGEGLQCVVPFGVPASATVRRRAQAGLCVCASSEPVCGSDANTYANLCQLRAASRRSERLHRPPVIVLQRGACGQGQEDPNSLRHKYNFIADVVEKIAPAVVHIELFRKLPFSKREVPVASGSGFIVSEDGLIVTNAHVVTNKHRVKVELKNGATYEAKIKDVDEKADIALIKIDHQGKLPVLLLGRSSELRPGEFVVAIGSPFSLQNTVTTGIVSTTQRGGKELGLRNSDMDYIQTDAIINYGNSGGPLVNLDGEVIGINTLKVTAGISFAIPSDKIKKFLTESHDRQAKGKAITKKKYIGIRMMSLTSSKAKELKDRHRDFPDVISGAYIIEVIPDTPAEAGGLKENDVIISINGQSVVSANDVSDVIKRESTLNMVVRRGNEDIMITVIPEEIDP

SEQ ID NO: 178 - protein, 585 aa, Homo sapiens
  BESTROPHIN 1 (BEST1), ISOFORM 1 <Accession No.: NP_004174.1>
MTITYTSQVANARLGSFSRLLLCWRGSIYKLLYGEFLIFLLCYYIIRFIYRLALTEEQQLMFEKLTLYCDSYIQLIPISFVLGFYVTLVVTRWWNQYENLPWPDRLMSLVSGFVEGKDEQGRLLRRTLIRYANLGNVLILRSVSTAVYKRFPSAQHLVQAGFMTPAEHKQLEKLSLPHNMFWVPWVWFANLSMKAWLGGRIRDPILLQSLLNEMNTLRTQCGHLYAYDWISIPLVYTQVVTVAVYSFFLTCLVGRQFLNPAKAYPGHELDLVVPVFTFLQFFFYVGWLKVAEQLINPFGEDDDDFETNWIVDRNLQVSLLAVDEMHQDLPRMEPDMYWNKPEPQPPYTAASAQFRRASFMGSTFNISLNKEEMEFQPNQEDEEDAHAGIIGRFLGLQSHDHHPPRANSRTKLLWPKRESLLHEGLPKNHKAAKQNVRGQEDNKAWKLKAVDAFKSAPLYQRPGYYSAPQTPLSPTPMFFPLEPSAPSKLHSVTGIDTKDKSLKTVSSGAKKSFELLSESDGALMEHPEVSQVRRKTVEFNLTDMPEIPENHLKEPLEQSPTNIHTTLKDHMDPYWALENRDEAHS

SEQ ID NO: 179 - protein, 604 aa, Homo sapiens
  BESTROPHIN 1 (BEST1), ISOFORM 2 <Accession No.: NP_001132915.1>
MFEKLTLYCDSYIQLIPISFVLGFYVTLVVTRWWNQYENLPWPDRLMSLVSGFVEGKDEQGRLLRRTLIRYANLGNVLILRSVSTAVYKRFPSAQHLVQAGFMTPAEHKQLEKLSLPHNMFWVPWVWFANLSMKAWLGGRIRDPILLQSLLNEMNTLRTQCGHLYAYDWISIPLVYTQVVTVAVYSFFLTCLVGRQFLNPAKAYPGHELDLVVPVFTFLQFFFYVGWLKVAEQLINPFGEDDDDFETNWIVDRNLQVSLLAVDEMHQDLPRMEPDMYWNKPEPQPPYTAASAQFRRASFMGSTFNISLNKEEMEFQPNQEDEEDAHAGIIGRFLGLQSHDHHPPRANSRTKLLWPKRESLLHEGLPKNHKAAKQNVRGQEDNKAWKLKAVDAFKSAPLYQRPGYYSAPQTPLSPTPMFFPLEPSAPSKLHSVTGIDTKDKSLKTVSSGAKKSFELLSESDGALMEHPEVSQVRRKTVEFNLTDMPEIPENHLKEPLEQSPTNIHTTLKDHMDPYWALENRSVLHLNQGHCIALCPTPASLALSLPFLHNFLGFHHCQSTLDLRPALAWGIYLATFTGILGKCSGPFLTSPWYHPEDFLGPGEGR

SEQ ID NO: 180 - protein, 525 aa, Homo sapiens
  BESTROPHIN 1 (BEST1), ISOFORM 3 <Accession No.: ALQ33849.1>
MFEKLTLYCDSYIQLIPISFVLGFYVTLVVTRWWNQYENLPWPDRLMSLVSGFVEGKDEQGRLLRRTLIRYANLGNVLILRSVSTAVYKRFPSAQHLVQAGFMTPAEHKQLEKLSLPHNMFWVPWVWFANLSMKAWLGGRIRDPILLQSLLNEMNTLRTQCGHLYAYDWISIPLVYTQVVTVAVYSFFLTCLVGRQFLNPAKAYPGHELDLVVPVFTFLQFFFYVGWLKVAEQLINPFGEDDDDFETNWIVDRNLQVSLLAVDEMHQDLPRMEPDMYWNKPEPQPPYTAASAQFRRASFMGSTFNISLNKEEMEFQPNQEDEEDAHAGIIGRFLGLQSHDHHPPRANSRTKLLWPKRESLLHEGLPKNHKAAKQNVRGQEDNKAWKLKAVDAFKSAPLYQRPGYYSAPQTPLSPTPMFFPLEPSAPSKLHSVTGIDTKDKSLKTVSSGAKKSFELLSESDGALMEHPEVSQVRRKTVEFNLTDMPEIPENHLKEPLEQSPTNIHTTLKDHMDPYWALENRDEAHS

SEQ ID NO: 181 - protein, 474 aa, Homo sapiens
  BESTROPHIN 1 (BEST1), ISOFORM 4 <Accession No.: NP_001287716.1>
MFEKLTLYCDSYIQLIPISFVLGFYVTLVVTRWWNQYENLPWPDRLMSLVSGFVEGKDEQGRLLRRTLIRYANLGNVLILRSVSTAVYKRFPSAQHLVQAGFMTPAEHKQLEKLSLPHNMFWVPWVWFANLSMKAWLGGRIRDPILLQSLLNEMNTLRTQCGHLYAYDWISIPLVYTQVAEQLINPFGEDDDDFETNWIVDRNLQVSLLAVDEMHQDLPRMEPDMYWNKPEPQPPYTAASAQFRRASFMGSTFNISLNKEEMEFQPNQEDEEDAHAGIIGRFLGLQSHDHHPPRANSRTKLLWPKRESLLHEGLPKNHKAAKQNVRGQEDNKAWKLKAVDAFKSAPLYQRPGYYSAPQTPLSPTPMFFPLEPSAPSKLHSVTGIDTKDKSLKTVSSGAKKSFELLSESDGALMEHPEVSQVRRKTVEFNLTDMPEIPENHLKEPLEQSPTNIHTTLKDHMDPYWALENRDEAHS

SEQ ID NO: 182 - protein, 558 aa, Homo sapiens
  BESTROPHIN 1 (BEST1), ISOFORM 5 <Accession No.: NP_001350520.1>
MSLVSGFVEGKDEQGRLLRRTLIRYANLGNVLILRSVSTAVYKRFPSAQHLVQAGFMTPAEHKQLEKLSLPHNMFWVPWVWFANLSMKAWLGGRIRDPILLQSLLNEMNTLRTQCGHLYAYDWISIPLVYTQVVTVAVYSFFLTCLVGRQFLNPAKAYPGHELDLVVPVFTFLQFFFYVGWLKVAEQLINPFGEDDDDFETNWIVDRNLQVSLLAVDEMHQDLPRMEPDMYWNKPEPQPPYTAASAQFRRASFMGSTFNISLNKEEMEFQPNQEDEEDAHAGIIGRFLGLQSHDHHPPRANSRTKLLWPKRESLLHEGLPKNHKAAKQNVRGQEDNKAWKLKAVDAFKSAPLYQRPGYYSAPQTPLSPTPMFFPLEPSAPSKLHSVTGIDTKDKSLKTVSSGAKKSFELLSESDGALMEHPEVSQVRRKTVEFNLTDMPEIPENHLKEPLEQSPTNIHTTLKDHMDPYWALENRSVLHLNQGHCIALCPTPASLALSLPFLHNFLGFHHCQSTLDLRPALAWGIYLATFTGILGKCSGPFLTSPWYHPEDFLGPGEGR

SEQ ID NO: 183 - protein, 435 aa, Homo sapiens
  BESTROPHIN 1 (BEST1), ISOFORM 6 <Accession No.: NP_001350521.1>
MTITYTSQVANARLGSFSRLLLCWRGSIYKLLYGEFLIFLLCYYIIRFIYRLALTEEQQLMFEKLTLYCDSYIQLIPISFVLGFYVTLVVTRWWNQYENLPWPDRLMSLVSGFVEGKDEQGRLLRRTLIRYANLGNVLILRSVSTAVYKRFPSAQHLVQAGFMTPAEHKQLEKLSLPHNMFWVPWVWFANLSMKAWLGGRIRDPILLQSLLNEMNTLRTQCGHLYAYDWISIPLVYTQVVTVAVYSFFLTCLVGRQFLNPAKAYPGHELDLVVPVFTFLQFFFYVGWLKVGLSRALLGWRHGQRGHGQQLPETRMQCQERKVSRVESSQAWWRTPVIPATREAEAGESLEPGRRRLWWQSSSSTPLERMMMILRPTGLSTGICRCPCWLWMRCTRTCLGWSRTCTGISPSHSPPTQLLPPSSVEPPLWAPPSTSA

SEQ ID NO: 184 - protein, 340 aa, Homo sapiens
  BESTROPHIN 1 (BEST1), ISOFORM 7 <Accession No.: NP_001350522.1>
MHQDLPRMEPDMYWNKPEPQPPYTAASAQFRRASFMGSTFNISLNKEEMEFQPNQEDEEDAHAGIIGRFLGLQSHDHHPPRANSRTKLLWPKRESLLHEGLPKNHKAAKQNVRGQEDNKAWKLKAVDAFKSAPLYQRPGYYSAPQTPLSPTPMFFPLEPSAPSKLHSVTGIDTKDKSLKTVSSGAKKSFELLSESDGALMEHPEVSQVRRKTVEFNLTDMPEIPENHLKEPLEQSPTNIHTTLKDHMDPYWALENRSVLHLNQGHCIALCPTPASLALSLPFLHNFLGFHHCQSTLDLRPALAWGIYLATFTGILGKCSGPFLTSPWYHPEDFLGPGEGR

SEQ ID NO: 185 - protein, 40 aa, Homo sapiens
  BESTROPHIN 1 (BEST1), ISOFORM 8 <Accession No.: ALQ33852.1>
MFEKLTLYCDSYIQLIPISFVLGDEHLAYSVWTPVCLRLD

SEQ ID NO: 186 - protein, 764 aa, Homo sapiens
  COMPLEMENT FACTOR B  <Accession No.: AAA16820.1>
MGSNLSPQLCLMPFILGLLSGGVTTTPWSLAQPQGSCSLEGVEIKGGSFRLLQEGQALEYVCPSGFYPYPVQTRTCRSTGSWSTLKTQDQKTVRKAECRAIHCPRPHDFENGEYWPRSPYYNVSDEISFHCYDGYTLRGSANRTCQVNGRWSGQTAICDNGAGYCSNPGIPIGTRKVGSQYRLEDSVTYHCSRGLTLRGSQRRTCQEGGSWSGTEPSCQDSFMYDTPQEVAEAFLSSLTETIEGVDAEDGHGPGEQQKRKIVLDPSGSMNIYLVLDGSDSIGASNFTGAKKCLVNLIEKVASYGVKPRYGLVTYATYPKIWVKVSEADSSNADWVTKQLNEINYEDHKLKSGTNTKKALQAVYSMMSWPDDVPPEGWNRTRHVIILMTDGLHNMGGDPITVIDEIRDLLYIGKDRKNPREDYLDVYVFGVGPLVNQVNINALASKKDNEQHVFKVKDMENLEDVFYQMIDESQSLSLCGMVWEHRKGTDYHKQPWQAKISVIRPSKGHESCMGAVVSEYFVLTAAHCFTVDDKEHSIKVSVGGEKRDLEIEVVLFHPNYNINGKKEAGIPEFYDYDVALIKLKNKLKYGQTIRPICLPCTEGTTRALRLPPTTTCQQQKEELLPAQDIKALFVSEEEKKLTRKEVYIKNGDKKGSCERDAQYAPGYDKVKDISEVVTPRFLCTGGVSPYADPNTCRGDSGGPLIVHKRSRFIQVGVISWGVVDVCKNQKRQKQVPAHARDFHINLFQVLPWLKEKLQDEDLGFL

SEQ ID NO: 187 - protein, 30 aa, Homo sapiens
  BETA-AMYLOID, PARTIAL  <Accession No.: AAB29908.1>
DAEFRHDSGYEVHHQKLVFFAEDVGSNKGA

SEQ ID NO: 188 - protein, 82 aa, Homo sapiens
  BETA-AMYLOID, PARTIAL  <Accession No.: AAB26264.2>
GSGLTNIKTEEISEVKMDAEFRHDSGYEVHHQKLVFFAEDVGSNKGAIIGLMVGGVVIATVIIITLVMLKKQYTSNHHGVVE

SEQ ID NO: 189 - protein, 128 aa, Homo sapiens
  CD59 GLYCOPROTEIN (CD59) <Accession No.: NP_001120697.1>
MGIQGGSVLFGLLLVLAVFCHSGHSLQCYNCPNPTADCKTAVNCSSDFDACLITKAGLQVYNKCWKFEHCNFNDVTTRLRENELTYYCCKKDLCNFNEQLENGGTSLSEKTVLLLVTPFLAAAWSLHP

SEQ ID NO: 190 - protein, 837 aa, Homo sapiens
  CHANNELRHODOPSIN-1 (CHR1) [VOLVOX CARTERI F. NAGARIENSIS] <Accession No.: ABZ90901.1>
MDYPVARSLIVRYPTDLGNGTVCMPRGQCYCEGWLRSRGTSIEKTIAITLQWVVFALSVACLGWYAYQAWRATCGWEEVYVALIEMMKSIIEAFHEFDSPATLWLSSGNGVVWMRYGEWLLTCPVLLIHLSNLTGLKDDYSKRTMGLLVSDVGCIVWGATSAMCTGWTKILFFLISLSYGMYTYFHAAKVYIEAFHTVPKGICRELVRVMAWTFFVAWGMFPVLFLLGTEGFGHISPYGSAIGHSILDLIAKNMWGVLGNYLRVKIHEHILLYGDIRKKQKITIAGQEMEVETLVAEEEDDTVKQSTAKYASRDSFITMRNRMREKGLEVRASLDAGGGDSGMEAGGGGAAHAQPHMAKPGTELGKTMSASFTNGAATSLEPGRVILAVPDISMVDFFREQFAQLPVPYEVVPALGAENTVQLVQQAAMLGGCDFVLMHPEFLRDRGPTGLLPQVKMMGQRTAAFGWSQMGPMRDLIESSGVGAWLEGPSFGSGISQAALQQLVVKMQQAKRMAAMGSMMGGGMGNGMGMGMGMGMGMGMGNGMGNGMGMGNGMGNGMGMGNGMGNGMGMGNGMGMGNGMGMGNGMGMGNGMGNGMGNGMGMGNGMGNGMGNGMGNGMGNGMGNGMGMGNGMGMGNGMGNGMGNGMGNGMGNGMGMMTPGAMGMGMGGMGNLAAAAGNAMYGGGGGGGGSTMGSGNAAMMTGLVMGGGNGVGAGPGGVVANLGSSALQPQSQMMGGGNVVGMSSPQLQLQQSSSMPLGGLAPNRIGNNPLFGAAPSPLHSQPGASPTGLSSPQLGMGAMLPAGTSVGAGGGSVGPTETDMLQQLMTEINRLKDELGE

SEQ ID NO: 191 - protein, 747 aa, Homo sapiens
  CHANNELRHODOPSIN-2 (CHR2) [VOLVOX CARTERI F. NAGARIENSIS <Accession No.: ABZ90903.1>
MDHPVARSLIGSSYTNLNNGSIVIPSDACFCMKWLKSKGSPVALKMANALQWAAFALSVIILIYYAYATWRTTCGWEEVYVCCVELTKVVIEFFHEFDEPGMLYLANGNRVLWLRYGEWLLTCPVILIHLSNLTGLKDDYNKRTMRLLVSDVGTIVWGATAAMSTGYIKVIFFLLGCMYGANTFFHAAKVYIESYHTVPKGLCRQLVRAMAWLFFVSWGMFPVLFLLGPEGFGHLSVYGSTIGHTIIDLLSKNCWGLLGHFLRLKIHEHILLYGDIRKVQKIRVAGEELEVETLMTEEAPDTVKKSTAQYANRESFLTMRDKLKEKGFEVRASLDNSGIDAVINHNNNYNNALANAAAAVGKPGMELSKLDHVAANAAGMGGIADHVATTSGAISPGRVILAVPDISMVDYFREQFAQLPVQYEVVPALGADNAVQLVVQAAGLGGCDFVLLHPEFLRDKSSTSLPARLRSIGQRVAAFGWSPVGPVRDLIESAGLDGWLEGPSFGLGISLPNLASLVLRMQHARKMAAMLGGMGGMLGSNLMSGSGGVGLMGAGSPGGGGGAMGVGMTGMGMVGTNAMGRGAVGNSVANASMGGGSAGMGMGMMGMVGAGVGGQQQMGANGMGPTSFQLGSNPLYNTAPSPLSSQPGGDASAAAAAAAAAAATGAASNSMNAMQAGGSVRNSGILAGGLGSMMGPPGAPAAPTAAATAAPAVTMGAPGGGGAAASEAEMLQQLMAEINRLKSELGE

SEQ ID NO: 192 - protein, 1676 aa, Homo sapiens
  COMPLEMENT FACTOR C5, ISOFORM 1 <Accession No.: NP_001726.2>
MGLLGILCFLIFLGKTWGQEQTYVISAPKIFRVGASENIVIQVYGYTEAFDATISIKSYPDKKFSYSSGHVHLSSENKFQNSAILTIQPKQLPGGQNPVSYVYLEVVSKHFSKSKRMPITYDNGFLFIHTDKPVYTPDQSVKVRVYSLNDDLKPAKRETVLTFIDPEGSEVDMVEEIDHIGIISFPDFKIPSNPRYGMWTIKAKYKEDFSTTGTAYFEVKEYVLPHFSVSIEPEYNFIGYKNFKNFEITIKARYFYNKVVTEADVYITFGIREDLKDDQKEMMQTAMQNTMLINGIAQVTFDSETAVKELSYYSLEDLNNKYLYIAVTVIESTGGFSEEAEIPGIKYVLSPYKLNLVATPLFLKPGIPYPIKVQVKDSLDQLVGGVPVTLNAQTIDVNQETSDLDPSKSVTRVDDGVASFVLNLPSGVTVLEFNVKTDAPDLPEENQAREGYRAIAYSSLSQSYLYIDWTDNHKALLVGEHLNIIVTPKSPYIDKITHYNYLILSKGKIIHFGTREKFSDASYQSINIPVTQNMVPSSRLLVYYIVTGEQTAELVSDSVWLNIEEKCGNQLQVHLSPDADAYSPGQTVSLNMATGMDSWVALAAVDSAVYGVQRGAKKPLERVFQFLEKSDLGCGAGGGLNNANVFHLAGLTFLTNANADDSQENDEPCKEILRPRRTLQKKIEEIAAKYKHSVVKKCCYDGACVNNDETCEQRAARISLGPRCIKAFTECCVVASQLRANISHKDMQLGRLHMKTLLPVSKPEIRSYFPESWLWEVHLVPRRKQLQFALPDSLTTWEIQGVGISNTGICVADTVKAKVFKDVFLEMNIPYSVVRGEQIQLKGTVYNYRTSGMQFCVKMSAVEGICTSESPVIDHQGTKSSKCVRQKVEGSSSHLVTFTVLPLEIGLHNINFSLETWFGKEILVKTLRVVPEGVKRESYSGVTLDPRGIYGTISRRKEFPYRIPLDLVPKTEIKRILSVKGLLVGEILSAVLSQEGINILTHLPKGSAEAELMSVVPVFYVFHYLETGNHWNIFHSDPLIEKQKLKKKLKEGMLSIMSYRNADYSYSVWKGGSASTWLTAFALRVLGQVNKYVEQNQNSICNSLLWLVENYQLDNGSFKENSQYQPIKLQGTLPVEARENSLYLTAFTVIGIRKAFDICPLVKIDTALIKADNFLLENTLPAQSTFTLAISAYALSLGDKTHPQFRSIVSALKREALVKGNPPIYRFWKDNLQHKDSSVPNTGTARMVETTAYALLTSLNLKDINYVNPVIKWLSEEQRYGGGFYSTQDTINAIEGLTEYSLLVKQLRLSMDIDVSYKHKGALHNYKMTDKNFLGRPVEVLLNDDLIVSTGFGSGLATVHVTTVVHKTSTSEEVCSFYLKIDTQDIEASHYRGYGNSDYKRIVACASYKPSREESSSGSSHAVMDISLPTGISANEEDLKALVEGVDQLFTDYQIKDGHVILQLNSIPSSDFLCVRFRIFELFEVGFLSPATFTVYEYHRPDKQCTMFYSTSNIKIQKVCEGAACKCVEADCGQMQEELDLTISAETRKQTACKPEIAYAYKVSITSITVENVFVKYKATLLDIYKTGEAVAEKDSEITFIKKVTCTNAELVKGRQYLIMGKEALQIKYNFSFRYIYPLDSLTWIEYWPRDTTCSSCQAFLANLDEFAEDIFLNGC

SEQ ID NO: 193 - protein, 1682 aa, Homo sapiens
  COMPLEMENT FACTOR C5, ISOFORM 2 <Accession No.: NP_001304092.1>
MPGSLGREASGRAGPTGCGAFAFGLRCRYVISAPKIFRVGASENIVIQVYGYTEAFDATISIKSYPDKKFSYSSGHVHLSSENKFQNSAILTIQPKQLPGGQNPVSYVYLEVVSKHFSKSKRMPITYDNGFLFIHTDKPVYTPDQSVKVRVYSLNDDLKPAKRETVLTFIDPEGSEVDMVEEIDHIGIISFPDFKIPSNPRYGMWTIKAKYKEDFSTTGTAYFEVKEYVLPHFSVSIEPEYNFIGYKNFKNFEITIKARYFYNKVVTEADVYITFGIREDLKDDQKEMMQTAMQNTMLINGIAQVTFDSETAVKELSYYSLEDLNNKYLYIAVTVIESTGGFSEEAEIPGIKYVLSPYKLNLVATPLFLKPGIPYPIKVQVKDSLDQLVGGVPVTLNAQTIDVNQETSDLDPSKSVTRVDDGVASFVLNLPSGVTVLEFNVKTDAPDLPEENQAREGYRAIAYSSLSQSYLYIDWTDNHKALLVGEHLNIIVTPKSPYIDKITHYNYLILSKGKIIHFGTREKFSDASYQSINIPVTQNMVPSSRLLVYYIVTGEQTAELVSDSVWLNIEEKCGNQLQVHLSPDADAYSPGQTVSLNMATGMDSWVALAAVDSAVYGVQRGAKKPLERVFQFLEKSDLGCGAGGGLNNANVFHLAGLTFLTNANADDSQENDEPCKEILRPRRTLQKKIEEIAAKYKHSVVKKCCYDGACVNNDETCEQRAARISLGPRCIKAFTECCVVASQLRANISHKDMQLGRLHMKTLLPVSKPEIRSYFPESWLWEVHLVPRRKQLQFALPDSLTTWEIQGVGISNTGICVADTVKAKVFKDVFLEMNIPYSVVRGEQIQLKGTVYNYRTSGMQFCVKMSAVEGICTSESPVIDHQGTKSSKCVRQKVEGSSSHLVTFTVLPLEIGLHNINFSLETWFGKEILVKTLRVVPEGVKRESYSGVTLDPRGIYGTISRRKEFPYRIPLDLVPKTEIKRILSVKGLLVGEILSAVLSQEGINILTHLPKGSAEAELMSVVPVFYVFHYLETGNHWNIFHSDPLIEKQKLKKKLKEGMLSIMSYRNADYSYSVWKGGSASTWLTAFALRVLGQVNKYVEQNQNSICNSLLWLVENYQLDNGSFKENSQYQPIKLQGTLPVEARENSLYLTAFTVIGIRKAFDICPLVKIDTALIKADNFLLENTLPAQSTFTLAISAYALSLGDKTHPQFRSIVSALKREALVKGNPPIYRFWKDNLQHKDSSVPNTGTARMVETTAYALLTSLNLKDINYVNPVIKWLSEEQRYGGGFYSTQDTINAIEGLTEYSLLVKQLRLSMDIDVSYKHKGALHNYKMTDKNFLGRPVEVLLNDDLIVSTGFGSGLATVHVTTVVHKTSTSEEVCSFYLKIDTQDIEASHYRGYGNSDYKRIVACASYKPSREESSSGSSHAVMDISLPTGISANEEDLKALVEGVDQLFTDYQIKDGHVILQLNSIPSSDFLCVRFRIFELFEVGFLSPATFTVYEYHRPDKQCTMFYSTSNIKIQKVCEGAACKCVEADCGQMQEELDLTISAETRKQTACKPEIAYAYKVSITSITVENVFVKYKATLLDIYKTGEAVAEKDSEITFIKKVTCTNAELVKGRQYLIMGKEALQIKYNFSFRYIYPLDSLTWIEYWPRDTTCSSCQAFLANLDEFAEDIFLNGC

SEQ ID NO: 194 - protein, 902 aa, Homo sapiens
  COMPLEMENT FACTOR C5, ISOFORM 2 <Accession No.: NP_001304093.1>
MGLLGILCFLIFLGKTWGQEQTYVISAPKIFRVGASENIVIQVYGYTEAFDATISIKSYPDKKFSYSSGHVHLSSENKFQNSAILTIQPKQLPGGQNPVSYVYLEVVSKHFSKSKRMPITYDNGFLFIHTDKPVYTPDQSVKVRVYSLNDDLKPAKRETVLTFIDPEGSEVDMVEEIDHIGIISFPDFKIPSNPRYGMWTIKAKYKEDFSTTGTAYFEVKEYVLPHFSVSIEPEYNFIGYKNFKNFEITIKARYFYNKVVTEADVYITFGIREDLKDDQKEMMQTAMQNTMLINGIAQVTFDSETAVKELSYYSLEDLNNKYLYIAVTVIESTGGFSEEAEIPGIKYVLSPYKLNLVATPLFLKPGIPYPIKVQVKDSLDQLVGGVPVTLNAQTIDVNQETSDLDPSKSVTRVDDGVASFVLNLPSGVTVLEFNVKTDAPDLPEENQAREGYRAIAYSSLSQSYLYIDWTDNHKALLVGEHLNIIVTPKSPYIDKITHYNYLILSKGKIIHFGTREKFSDASYQSINIPVTQNMVPSSRLLVYYIVTGEQTAELVSDSVWLNIEEKCGNQLQVHLSPDADAYSPGQTVSLNMATGMDSWVALAAVDSAVYGVQRGAKKPLERVFQFLEKSDLGCGAGGGLNNANVFHLAGLTFLTNANADDSQENDEPCKEILRPRRTLQKKIEEIAAKYKHSVVKKCCYDGACVNNDETCEQRAARISLGPRCIKAFTECCVVASQLRANISHKDMQLGRLHMKTLLPVSKPEIRSYFPESWLWEVHLVPRRKQLQFALPDSLTTWEIQGVGISNTGICVADTVKAKVFKDVFLEMNIPYSVVRGEQIQLKGTVYNYRTSGMQSLALSPRLECNGKISGHCKLRLPGSSDSPASASQVAGITGTHHHAQPT

SEQ ID NO: 195 - protein, 1676 aa, Homo sapiens; identical to SEQ ID NO: 192
  COMPLEMENT FACTOR C5A <Accession No.: 3PVM_A>

SEQ ID NO: 196 - protein, 253 aa, Homo sapiens
  COMPLEMENT FACTOR D, ISOFORM 1 <Accession No.: NP_001919.2>
MHSWERLAVLVLLGAAACAAPPRGRILGGREAEAHARPYMASVQLNGAHLCGGVLVAEQWVLSAAHCLEDAADGKVQVLLGAHSLSQPEPSKRLYDVLRAVPHPDSQPDTIDHDLLLLQLSEKATLGPAVRPLPWQRVDRDVAPGTLCDVAGWGIVNHAGRRPDSLQHVLLPVLDRATCNRRTHHDGAITERLMCAESNRRDSCKGDSGGPLVCGGVLEGVVTSGSRVCGNRKKPGIYTRVASYAAWIDSVLA

SEQ ID NO: 197 - protein, 260 aa, Homo sapiens
  COMPLEMENT FACTOR D, ISOFORM 2 <Accession No.: NP_001304264.1>
MHSWERLAVLVLLGAAACGEEAWAWAAPPRGRILGGREAEAHARPYMASVQLNGAHLCGGVLVAEQWVLSAAHCLEDAADGKVQVLLGAHSLSQPEPSKRLYDVLRAVPHPDSQPDTIDHDLLLLQLSEKATLGPAVRPLPWQRVDRDVAPGTLCDVAGWGIVNHAGRRPDSLQHVLLPVLDRATCNRRTHHDGAITERLMCAESNRRDSCKGDSGGPLVCGGVLEGVVTSGSRVCGNRKKPGIYTRVASYAAWIDSVLA

SEQ ID NO: 198 - protein, 504 aa, Homo sapiens
  DNAJ HEAT SHOCK PROTEIN FAMILY (HSP40) MEMBER C3 (DNAJC3), ALSO KNOWN AS P58IPK <Accession No.: NP_006251.1>
MVAPGSVTSRLGSVFPFLLVLVDLQYEGAECGVNADVEKHLELGKKLLAAGQLADALSQFHAAVDGDPDNYIAYYRRATVFLAMGKSKAALPDLTKVIQLKMDFTAARLQRGHLLLKQGKLDEAEDDFKKVLKSNPSENEEKEAQSQLIKSDEMQRLRSQALNAFGSGDYTAAIAFLDKILEVCVWDAELRELRAECFIKEGEPRKAISDLKAASKLKNDNTEAFYKISTLYYQLGDHELSLSEVRECLKLDQDHKRCFAHYKQVKKLNKLIESAEELIRDGRYTDATSKYESVMKTEPSIAEYTVRSKERICHCFSKDEKPVEAIRVCSEVLQMEPDNVNALKDRAEAYLIEEMYDEAIQDYETAQEHNENDQQIREGLEKAQRLLKQSQKRDYYKILGVKRNAKKQEIIKAYRKLALQWHPDNFQNEEEKKKAEKKFIDIAAAKEVLSDPEMRKKFDDGEDPLDAESQQGGGGNPFHRSWNSWQGFNPFSSGGPFRFKFHFN

SEQ ID NO: 199 - protein, 533 aa, Homo sapiens
  DNAJ HEAT SHOCK PROTEIN FAMILY (HSP40) MEMBER C3 (DNAJC3), ALSO KNOWN AS P58IPK, ISOFORM X1 <Accession No.: XP_011519406.1>
MVAPGSVTSRLGSVFPFLLVLVDLQYEGAECGVNADVEKHLELGKKLLAAGQLADALSQFHAAVDGDPDNYIAYYRRATVFLAMGKSKAALPDLTKVIQLKMDFTAARLQRGHLLLKQGKLDEAEDDFKKVVFPVPSLLGLQRSLLDDLYLLFWFFLMKKLKSNPSENEEKEAQSQLIKSDEMQRLRSQALNAFGSGDYTAAIAFLDKILEVCVWDAELRELRAECFIKEGEPRKAISDLKAASKLKNDNTEAFYKISTLYYQLGDHELSLSEVRECLKLDQDHKRCFAHYKQVKKLNKLIESAEELIRDGRYTDATSKYESVMKTEPSIAEYTVRSKERICHCFSKDEKPVEAIRVCSEVLQMEPDNVNALKDRAEAYLIEEMYDEAIQDYETAQEHNENDQQIREGLEKAQRLLKQSQKRDYYKILGVKRNAKKQEIIKAYRKLALQWHPDNFQNEEEKKKAEKKFIDIAAAKEVLSDPEMRKKFDDGEDPLDAESQQGGGGNPFHRSWNSWQGFNPFSSGGPFRFKFHFN

SEQ ID NO: 200 - protein, 450 aa, Homo sapiens
  DNAJ HEAT SHOCK PROTEIN FAMILY (HSP40) MEMBER C3 (DNAJC3), ALSO KNOWN AS P58IPK, ISOFORM X2 <Accession No.: XP_011519407.1>
MGKSKAALPDLTKVIQLKMDFTAARLQRGHLLLKQGKLDEAEDDFKKVVFPVPSLLGLQRSLLDDLYLLFWFFLMKKLKSNPSENEEKEAQSQLIKSDEMQRLRSQALNAFGSGDYTAAIAFLDKILEVCVWDAELRELRAECFIKEGEPRKAISDLKAASKLKNDNTEAFYKISTLYYQLGDHELSLSEVRECLKLDQDHKRCFAHYKQVKKLNKLIESAEELIRDGRYTDATSKYESVMKTEPSIAEYTVRSKERICHCFSKDEKPVEAIRVCSEVLQMEPDNVNALKDRAEAYLIEEMYDEAIQDYETAQEHNENDQQIREGLEKAQRLLKQSQKRDYYKILGVKRNAKKQEIIKAYRKLALQWHPDNFQNEEEKKKAEKKFIDIAAAKEVLSDPEMRKKFDDGEDPLDAESQQGGGGNPFHRSWNSWQGFNPFSSGGPFRFKFHFN

SEQ ID NO: 201 - protein, 421 aa, Homo sapiens
  DNAJ HEAT SHOCK PROTEIN FAMILY (HSP40) MEMBER C3 (DNAJC3), ALSO KNOWN AS P58IPK, ISOFORM X3 <Accession No.: XP_016876163.1>
MGKSKAALPDLTKVIQLKMDFTAARLQRGHLLLKQGKLDEAEDDFKKVLKSNPSENEEKEAQSQLIKSDEMQRLRSQALNAFGSGDYTAAIAFLDKILEVCVWDAELRELRAECFIKEGEPRKAISDLKAASKLKNDNTEAFYKISTLYYQLGDHELSLSEVRECLKLDQDHKRCFAHYKQVKKLNKLIESAEELIRDGRYTDATSKYESVMKTEPSIAEYTVRSKERICHCFSKDEKPVEAIRVCSEVLQMEPDNVNALKDRAEAYLIEEMYDEAIQDYETAQEHNENDQQIREGLEKAQRLLKQSQKRDYYKILGVKRNAKKQEIIKAYRKLALQWHPDNFQNEEEKKKAEKKFIDIAAAKEVLSDPEMRKKFDDGEDPLDAESQQGGGGNPFHRSWNSWQGFNPFSSGGPFRFKFHFN

SEQ ID NO: 202 - protein, 383 aa, Homo sapiens
  DNAJ HEAT SHOCK PROTEIN FAMILY (HSP40) MEMBER C3 (DNAJC3), ALSO KNOWN AS P58IPK, ISOFORM X4 <Accession No.: XP_016876164.1>
MCFLHFFKKVLKSNPSENEEKEAQSQLIKSDEMQRLRSQALNAFGSGDYTAAIAFLDKILEVCVWDAELRELRAECFIKEGEPRKAISDLKAASKLKNDNTEAFYKISTLYYQLGDHELSLSEVRECLKLDQDHKRCFAHYKQVKKLNKLIESAEELIRDGRYTDATSKYESVMKTEPSIAEYTVRSKERICHCFSKDEKPVEAIRVCSEVLQMEPDNVNALKDRAEAYLIEEMYDEAIQDYETAQEHNENDQQIREGLEKAQRLLKQSQKRDYYKILGVKRNAKKQEIIKAYRKLALQWHPDNFQNEEEKKKAEKKFIDIAAAKEVLSDPEMRKKFDDGEDPLDAESQQGGGGNPFHRSWNSWQGFNPFSSGGPFRFKFHFN

SEQ ID NO: 203 - protein, 413 aa, Homo sapiens
  BETA-2 ADRENOCEPTOR  <Accession No.: NP_000015.1>
MGQPGNGSAFLLAPNRSHAPDHDVTQQRDEVWVVGMGIVMSLIVLAIVFGNVLVITAIAKFERLQTVTNYFITSLACADLVMGLAVVPFGAAHILMKMWTFGNFWCEFWTSIDVLCVTASIETLCVIAVDRYFAITSPFKYQSLLTKNKARVIILMVWIVSGLTSFLPIQMHWYRATHQEAINCYANETCCDFFTNQAYAIASSIVSFYVPLVIMVFVYSRVFQEAKRQLQKIDKSEGRFHVQNLSQVEQDGRTGHGLRRSSKFCLKEHKALKTLGIIMGTFTLCWLPFFIVNIVHVIQDNLIRKEVYILLNWIGYVNSGFNPLIYCRSPDFRIAFQELLCLRRSSLKAYGNGYSSNGNTGEQSGYHVEQEKENKLLCEDLPGTEDFVGHQGTVPSDNIDSQGRNCSTNDSLL

SEQ ID NO: 204 - protein, 252 aa, Homo sapiens
  CASPASE-2 (CASP2) <Accession No.: AAX36439.1>
PKRGPQAFDAFCEALRETKQGHLEDMLLTTLSGLQHVLPPLSCDYDLSLPFPVCESCPLYKKLRLSTDTVEHSLDNKDGPVCLQVKPCTPEFYQTHFQLAYRLQSRPRGLALVLSNVHFTGEKELEFRSGGDVDHSTLVTLFKLLGYDVHVLCDQTAQEMQEKLQNFAQLPAHRVTDSCIVALLSHGVEGAIYGVDGKLLQLQEVFQLFDNANCPSLQNKPKMFFIQACRGGAIGSLGHLLLFTAATASLAL

SEQ ID NO: 205 - protein, 1242 aa, Homo sapiens
  INSULIN RECEPTOR SUBSTRATE 1 (IRS1) <Accession No.: NP_005535.1>
MASPPESDGFSDVRKVGYLRKPKSMHKRFFVLRAASEAGGPARLEYYENEKKWRHKSSAPKRSIPLESCFNINKRADSKNKHLVALYTRDEHFAIAADSEAEQDSWYQALLQLHNRAKGHHDGAAALGAGGGGGSCSGSSGLGEAGEDLSYGDVPPGPAFKEVWQVILKPKGLGQTKNLIGIYRLCLTSKTISFVKLNSEAAAVVLQLMNIRRCGHSENFFFIEVGRSAVTGPGEFWMQVDDSVVAQNMHETILEAMRAMSDEFRPRSKSQSSSNCSNPISVPLRRHHLNNPPPSQVGLTRRSRTESITATSPASMVGGKPGSFRVRASSDGEGTMSRPASVDGSPVSPSTNRTHAHRHRGSARLHPPLNHSRSIPMPASRCSPSATSPVSLSSSSTSGHGSTSDCLFPRRSSASVSGSPSDGGFISSDEYGSSPCDFRSSFRSVTPDSLGHTPPARGEEELSNYICMGGKGPSTLTAPNGHYILSRGGNGHRCTPGTGLGTSPALAGDEAASAADLDNRFRKRTHSAGTSPTITHQKTPSQSSVASIEEYTEMMPAYPPGGGSGGRLPGHRHSAFVPTRSYPEEGLEMHPLERRGGHHRPDSSTLHTDDGYMPMSPGVAPVPSGRKGSGDYMPMSPKSVSAPQQIINPIRRHPQRVDPNGYMMMSPSGGCSPDIGGGPSSSSSSSNAVPSGTSYGKLWTNGVGGHHSHVLPHPKPPVESSGGKLLPCTGDYMNMSPVGDSNTSSPSDCYYGPEDPQHKPVLSYYSLPRSFKHTQRPGEPEEGARHQHLRLSTSSGRLLYAATADDSSSSTSSDSLGGGYCGARLEPSLPHPHHQVLQPHLPRKVDTAAQTNSRLARPTRLSLGDPKASTLPRAREQQQQQQPLLHPPEPKSPGEYVNIEFGSDQSGYLSGPVAFHSSPSVRCPSQLQPAPREEETGTEEYMKMDLGPGRRAAWQESTGVEMGRLGPAPPGAASICRPTRAVPSSRGDYMTMQMSCPRQSYVDTSPAAPVSYADMRTGIAAEEVSLPRATMAAASSSSAASASPTGPQGAAELAAHSSLLGGPQGPGGMSAFTRVNLSPNRNQSAKVIRADPQGCRRRHSSETFSSTPSATRVGNTVPFGAGAAVGGGGGSSSSSEDVKRHSSASFENVWLRPGELGGAPKEPAKLCGAAGGLENGLNYIDLDLVKDFKQCPQECTPEPQPPPPPPPHQPLGSGESSSTRRSSEDLSAYASISFQKQPEDRQ

SEQ ID NO: 206 - protein, 232 aa, Homo sapiens
  HIF-1 RESPONSIVE PROTEIN RTP801 (RTP801) <Accession No.: Q9NX09.1>
MPSLWDRFSSSSTSSSPSSLPRTPTPDRPPRSAWGSATREEGFDRSTSLESSDCESLDSSNSGFGPEEDTAYLDGVSLPDFELLSDPEDEHLCANLMQLLQESLAQARLGSRRPARLLMPSQLVSQVGKELLRLAYSEPCGLRGALLDVCVEQGKSCHSVGQLALDPSLVPTFQLTLVLRLDSRLWPKIQGLFSSANSPFLPGFSQSLTLSTGFRVIKKKLYSSEQLLIEEC

SEQ ID NO: 207 - protein, 414 aa, Homo sapiens
  TRANSFORMING GROWTH FACTOR BETA 2 (TGFB2) <Accession No.: AAH99635.1>
MHYCVLSAFLILHLVTVALSLSTCSTLDMDQFMRKRIEAIRGQILSKLKLTSPPEDYPEPEEVPPEVISIYNSTRDLLQEKASRRAAACERERSDEEYYAKEVYKIDMPPFFPSENAIPPTFYRPYFRIVRFDVSAMEKNASNLVKAEFRVFRLQNPKARVPEQRIELYQILKSKDLTSPTQRYIDSKVVKTRAEGEWLSFDVTDAVHEWLHHKDRNLGFKISLHCPCCTFVPSNNYIIPNKSEELEARFAGIDGTSTYTSGDQKTIKSTRKKNSGKTPHLLLMLLPSYRLESQQTNRRKKRALDAAYCFRNVQDNCCLRPLYIDFKRDLGWKWIHEPKGYNANFCAGACPYLWSSDTQHSRVLSLYNTINPEASASPCCVSQDLEPLTILYYIGKTPKIEQLSNMIVKSCKCS

SEQ ID NO: 208 - protein, 442 aa, Homo sapiens
  TRANSFORMING GROWTH FACTOR BETA 2 (TGFB2), ISOFORM CRA_A <Accession No.: EAW93326.1>
MHYCVLSAFLILHLVTVALSLSTCSTLDMDQFMRKRIEAIRGQILSKLKLTSPPEDYPEPEEVPPEVISIYNSTRDLLQEKASRRAAACERERSDEEYYAKEVYKIDMPPFFPSETVCPVVTTPSGSVGSLCSRQSQVLCGYLDAIPPTFYRPYFRIVRFDVSAMEKNASNLVKAEFRVFRLQNPKARVPEQRIELYQILKSKDLTSPTQRYIDSKVVKTRAEGEWLSFDVTDAVHEWLHHKDRNLGFKISLHCPCCTFVPSNNYIIPNKSEELEARFAGIDGTSTYTSGDQKTIKSTRKKNSGKTPHLLLMLLPSYRLESQQTNRRKKRALDAAYCFRNVQDNCCLRPLYIDFKRDLGWKWIHEPKGYNANFCAGACPYLWSSDTQHSRVLSLYNTINPEASASPCCVSQDLEPLTILYYIGKTPKIEQLSNMIVKSCKCS

SEQ ID NO: 209 - protein, 414 aa, Homo sapiens; identical to SEQ ID NO: 207
  TRANSFORMING GROWTH FACTOR BETA 2 (TGFB2), ISOFORM CRA_B <Accession No.: EAW93327.1>

SEQ ID NO: 210 - protein, 247 aa, Homo sapiens
  BRAIN DERIVED NEUROTROPHIC FACTOR (BDNF) <Accession No.: AAO15434.1>
MTILFLTMVISYFGCMKAAPMKEANIRGQGGLAYPGVRTHGTLESVNGPKAGSRGLTSLADTFEHVIEELLDEDQKVRPNEENNKDADLYTSRVMLSSQVPLEPPLLFLLEEYKNYLDAANMSMRVRRHSDPARRGELSVCDSISEWVTAADKKTAVDMSGGTVTVLEKVPVSKGQLKQYFYETKCNPMGYTKEGCRGIDKRHWNSQCRTTQSYVRALTMDSKKRIGWRFIRIDTSCVCTLTIKRGR

SEQ ID NO: 211 - protein, 200 aa, Homo sapiens
  CILIARY NEUROTROPHIC FACTOR (CNTF) <Accession No.: NP_000605.1>
MAFTEHSPLTPHRRDLCSRSIWLARKIRSDLTALTESYVKHQGLNKNINLDSADGMPVASTDQWSELTEAERLQENLQAYRTFHVLLARLLEDQQVHFTPTEGDFHQAIHTLLLQVAAFAYQIEELMILLEYKIPRNEADGMPINVGDGGLFEKKLWGLKVLQELSQWTVRSIHDLRFISSHQTGIPARGSHYIANNKKM

SEQ ID NO: 212 - protein, 604 aa, Homo sapiens
  PROSTAGLANDIN-ENDOPEROXIDE SYNTHASE 2 (PTGS2) <Accession No.: BAA05698.1>
MLARALLLCAVLALSHTANPCCSHPCQNRGVCMSVGFDQYKCDCTRTGFYGENCSTPEFLTRIKLFLKPTPNTVHYILTHFKGFWNVVNNIPFLRNAIMSYVLTSRSHLIDSPPTYNADYGYKSWEAFSNLSYYTRALPPVPDDCPTPLGVKGKKQLPDSNEIVEKLLLRRKFIPDPQGSNMMFAFFAQHFTHQFFKTDHKRGPAFTNGLGHGVDLNHIYGETLARQRKLRLFKDGKMKYQIIDGEMYPPTVKDTQAEMIYPPQVPEHLRFAVGQEVFGLVPGLMMYATIWLREHNRVCDVLKQEHPEWGDEQLFQTSRLILIGETIKIVIEDYVQHLSGYHFKLKFDPELLFNKQFQYQNRIAAEFNTLYHWHPLLPDTFQIHDQKYNYQQFIYNNSILLEHGITQFVESFTRQIAGRVAGGRNVPPAVQKVSQASIDQSRQMKYQSFNEYRKRFMLKPYESFEELTGEKEMSAELEALYGDIDAVELYPALLVEKPRPDAIFGETMVEVGAPFSLKGLMGNVICSPAYWKPSTFGGEVGFQIINTASIQSLICNNVKGCPFTSFSVPDPELIKTVTINASSSRSGLDDINPTVLLKERSTEL

SEQ ID NO: 213 - protein, 359 aa, Homo sapiens
  PROSTAGLANDIN F RECEPTOR (PTGFR) <Accession No.: AAQ76788.1>
MSMNNSKQLVSPAAALLSNTTCQTENRLSVFFSVIFMTVGILSNSLAIAILMKAYQRFRQKSKASFLLLASGLVITDFFGHLINGAIAVFVYASDKEWIRFDQSNVLCSIFGICMVFSGLCPLLLGSVMAIERCIGVTKPIFHSTKITSKHVKMMLSGVCLFAVFIALLPILGHRDYKIQASRTWCFYNTEDIKDWEDRFYLLLFSFLGLLALGVSLLCNAITGITLLRVKFKSQQHRQGRSHHLEMVIQLLAIMCVSCICWSPFLVTMANIGINGNHSLETCETTLFALRMATWNQILDPWVYILLRKAVLKNLYKLASQCCGVHVISLHIWELSSIKNSLKVAAISESPVAEKSAST

SEQ ID NO: 214 - protein, 359 aa, Homo sapiens; identical to SEQ ID NO: 213
  PROSTAGLANDIN F RECEPTOR (PTGFR), ISOFORM CRA_A <Accession No.: EAX06350.1>

SEQ ID NO: 215 - protein, 297 aa, Homo sapiens
  PROSTAGLANDIN F RECEPTOR (PTGFR), ISOFORM CRA_B <Accession No.: EAX06351.1>
MSMNNSKQLVSPAAALLSNTTCQTENRLSVFFSVIFMTVGILSNSLAIAILMKAYQRFRQKSKASFLLLASGLVITDFFGHLINGAIAVFVYASDKEWIRFDQSNVLCSIFGICMVFSGLCPLLLGSVMAIERCIGVTKPIFHSTKITSKHVKMMLSGVCLFAVFIALLPILGHRDYKIQASRTWCFYNTEDIKDWEDRFYLLLFSFLGLLALGVSLLCNAITGITLLRVKFKSQQHRQGRSHHLEMVIQLLAIMCVSCICWSPFLGYRIILNGKEKYKVYEEQSDFLHRLQWPTLE

SEQ ID NO: 216 - protein, 463 aa, Homo sapiens [sequence omitted]

SEQ ID NO: 217 - protein, 418 aa, Homo sapiens
  PIGMENT EPITHELIUM-DERIVED FACTOR (PEDF); <Accession No.: P36955.4>
MQALVLLLCIGALLGHSSCQNPASPPEEGSPDPDSTGALVEEEDPFFKVPVNKLAAAVSNFGYDLYRVRSSTSPTTNVLLSPLSVATALSALSLGAEQRTESIIHRALYYDLISSPDIHGTYKELLDTVTAPQKNLKSASRIVFEKKLRIKSSFVAPLEKSYGTRPRVLTGNPRLDLQEINNWVQAQMKGKLARSTKEIPDEISILLLGVAHFKGQWVTKFDSRKTSLEDFYLDEERTVRVPMMSDPKAVLRYGLDSDLSCKIAQLPLTGSMSIIFFLPLKVTQNLTLIEESLTSEFIHDIDRELKTVQAVLTVPKLKLSYEGEVTKSLQEMKLQSLFDSPDFSKITGKPIKLTQVEHRAGFEWNEDGAGTTPSPGLQPAHLTFPLDYHLNQPFIFVLRDTDTGALLFIGKILDPRGP

SEQ ID NO: 218 - protein, 418 aa, Homo sapiens; identical to SEQ ID NO: 217
  PIGMENT EPITHELIUM-DERIVED FACTOR (PEDF); ISOFORM 1 PRECURSOR <Accession No.: NP_001316832.1>

SEQ ID NO: 219 - protein, 231 aa, Homo sapiens
  PIGMENT EPITHELIUM-DERIVED FACTOR (PEDF); ISOFORM 2 <Accession No.: NP_001316834.1>
MKGKLARSTKEIPDEISILLLGVAHFKGQWVTKFDSRKTSLEDFYLDEERTVRVPMMSDPKAVLRYGLDSDLSCKIAQLPLTGSMSIIFFLPLKVTQNLTLIEESLTSEFIHDIDRELKTVQAVLTVPKLKLSYEGEVTKSLQEMKLQSLFDSPDFSKITGKPIKLTQVEHRAGFEWNEDGAGTTPSPGLQPAHLTFPLDYHLNQPFIFVLRDTDTGALLFIGKILDPRGP

SEQ ID NO: 220 - protein, 191 aa, Homo sapiens
  VASCULAR ENDOTHELIAL GROWTH FACTOR (VEGF) <Accession No.: CAA44447.1>
MNFLLSWVHWSLALLLYLHHAKWSQAAPMAEGGGQNHHEVVKFMDVYQRSYCHPIETLVDIFQEYPDEIEYIFKPSCVPLMRCGGCCNDEGLECVPTEESNITMQIMRIKPHQGQHIGEMSFLQHNKCECRPKKDRARQENPCGPCSERRKHLFVQDPQTCKCSCKNTDSRCKARQLELNERTCRCDKPRR

SEQ ID NO: 221 - protein, 170 aa, Homo sapiens
  PLACENTAL GROWTH FACTOR (PGF)  <Accession No.: AAH07789.1>
MPVMRLFPCFLQLLAGLALPAVPPQQWALSAGNGSSEVEVVPFQEVWGRSYCRALERLVDVVSEYPSEVEHMFSPSCVSLLRCTGCCGDENLHCVPVETANVTMQLLKIRSGDRPSYVELTFSQHVRCECRPLREKMKPERRRPKGRGKRRREKQRPTDCHLCGDAVPRR

SEQ ID NO: 222 - protein, 490 aa, Homo sapiens
  MYOCILIN (MYOC) <Accession No.: BAA24532.1>
MPAVQLLLLACLVWDVGARTAQLRKANDQSGRCQYTFSVASPNESSCPEQSQAMSVIHNLQRDSSTQRLDLEATKARLSSLESLLHQLTLDQAARPQETQEGLQRELGTLRRERDQLETQTRELETAYSNLLRDKSVLEEEKKRLRQENENLARRLESSSQEVARLRRGQCPQTRDTARAVPPGSREVSTWNLDTLAFQELKSELTEVPASRILKESPSGYLRSGEGDTGCGELVWVGEPLTLRTAETITGKYGVWMRDPKPTYPYTQETTWRIDTVGTDVRQVFEYDLISQFMQGYPSKVHILPRPLESTGAVVYSGSLYFQGAESRTVIRYELNTETVKAEKEIPGAGYHGQFPYSWGGYTDIDLAVDEAGLWVIYSTDEAKGAIVLSKLNPENLELEQTWETNIRKQSVANAFIICGTLYTVSSYTSADATVNFAYDTGTGISKTLTIPFKNRYKYSSMIDYNPLEKKLFAWDNLNMVTYDIKLSKM

SEQ ID NO: 223 - protein, 352 aa, Homo sapiens [sequence omitted]

SEQ ID NO: 224 - protein, 557 aa, Homo sapiens [sequence omitted]

SEQ ID NO: 225 - protein, 1285 aa, Homo sapiens
  CRUMBS CELL POLARITY COMPLEX COMPONENT 2 (CRB2), PRECURSOR <Accession No.: NP_775960.4>
MALARPGTPDPQALASVLLLLLWAPALSLLAGTVPSEPPSACASDPCAPGTECQATESGGYTCGPMEPRGCATQPCHHGALCVPQGPDPTGFRCYCVPGFQGPRCELDIDECASRPCHHGATCRNLADRYECHCPLGYAGVTCEMEVDECASAPCLHGGSCLDGVGSFRCVCAPGYGGTRCQLDLDECQSQPCAHGGTCHDLVNGFRCDCAGTGYEGTHCEREVLECASAPCEHNASCLEGLGSFRCLCWPGYSGELCEVDEDECASSPCQHGGRCLQRSDPALYGGVQAAFPGAFSFRHAAGFLCHCPPGFEGADCGVEVDECASRPCLNGGHCQDLPNGFQCHCPDGYAGPTCEEDVDECLSDPCLHGGTCSDTVAGYICRCPETWGGRDCSVQLTGCQGHTCPLAATCIPIFESGVHSYVCHCPPGTHGPFCGQNTTFSVMAGSPIQASVPAGGPLGLALRFRTTLPAGTLATRNDTKESLELALVAATLQATLWSYSTTVLVLRLPDLALNDGHWHQVEVVLHLATLELRLWHEGCPARLCVASGPVALASTASATPLPAGISSAQLGDATFAGCLQDVRVDGHLLLPEDLGENVLLGCERREQCRPLPCVHGGSCVDLWTHFRCDCARPHRGPTCADEIPAATFGLGGAPSSASFLLQELPGPNLTVSFLLRTRESAGLLLQFANDSAAGLTVFLSEGRIRAEVPGSPAVVLPGRWDDGLRHLVMLSFGPDQLQDLGQHVHVGGRLLAADSQPWGGPFRGCLQDLRLDGCHLPFFPLPLDNSSQPSELGGRQSWNLTAGCVSEDMCSPDPCFNGGTCLVTWNDFHCTCPANFTGPTCAQQLWCPGQPCLPPATCEEVPDGFVCVAEATFREGPPAAFSGHNASSGRLLGGLSLAFRTRDSEAWLLRAAAGALEGVWLAVRNGSLAGGVRGGHGLPGAVLPIPGPRVADGAWHRVRLAMERPAATTSRWLLWLDGAATPVALRGLASDLGFLQGPGAVRILLAENFTGCLGRVALGGLPLPLARPRPGAAPGAREHFASWPGTPAPILGCRGAPVCAPSPCLHDGACRDLFDAFACACGPGWEGPRCEAHVDPCHSAPCARGRCHTHPDGRFECRCPPGFGGPRCRLPVPSKECSLNVTCLDGSPCEGGSPAANCSCLEGLAGQRCQVPTLPCEANPCLNGGTCRAAGGVSECICNARFSGQFCEVAKGLPLPLPFPLLEVAVPAACACLLLLLLGLLSGILAARKRRQSEGTYSPSQQEVAGARLEMDSVLKVPPEERLI

SEQ ID NO: 226 - protein, 1276 aa, Homo sapiens
  CRUMBS CELL POLARITY COMPLEX COMPONENT 2 (CRB2), ISOFORM X1 <Accession No.: XP_011516858.1>
MALARPGTPDPQALASVLLLLLWAPALSLLAGTVPSEPPSACASDPCAPGTECQATESGGYTCGPMEPRGCATQPCHHGALCVPQGPDPTGFRCYCVPGFQGPRCELDIDECASRPCHHGATCRNLADRYECHCPLGYAGVTCEMEVDECASAPCLHGGSCLDGVGSFRCVCAPGYGGTRCQLDLDECQSQPCAHGGTCHDLVNGFRCDCAGTGYEGTHCEREVLECASAPCEHNASCLEGLGSFRCLCWPGYSGELCEVDEDECASSPCQHGGRCLQRSDPALYGGVQAAFPGAFSFRHAAGFLCHCPPGFEGADCGVEVDECASRPCLNGGHCQDLPNGFQCHCPDGYAGPTCEEDVDECLSDPCLHGGTCSDTVAGYICRCPETWGGRDCSVQLTGCQGHTCPLAATCIPIFESGVHSYVCHCPPGTHGPFCGQNTTFSVMAGSPIQASVPAGGPLGLALRFRTTLPAGTLATRNDTKESLELALVAATLQATLWSYSTTVLVLRLPDLALNDGHWHQVEVVLHLATLELRLWHEGCPARLCVASGPVALASTASATPLPAGISSAQLGDATFAGCLQDVRVDGHLLLPEDLGENVLLGCERREQCRPLPCVHGGSCVDLWTHFRCDCARPHRGPTCADEIPAATFGLGGAPSSASFLLQELPGPNLTVSFLLRTRESAGLLLQFANDSAAGLTVFLSEGRIRAEVPGSPAVVLPGRWDDGLRHLVMLSFGPDQLQDLGQHVHVGGRLLAADSQPWGGPFRGCLQDLRLDGCHLPFFPLPLDNSSQPSELGGRQSWNLTAGCVSEDMCSPDPCFNGGTCLVTWNDFHCTCPANFTGPTCAQQLWCPGQPCLPPATCVAEATFREGPPAAFSGHNASSGRLLGGLSLAFRTRDSEAWLLRAAAGALEGVWLAVRNGSLAGGVRGGHGLPGAVLPIPGPRVADGAWHRVRLAMERPAATTSRWLLWLDGAATPVALRGLASDLGFLQGPGAVRILLAENFTGCLGRVALGGLPLPLARPRPGAAPGAREHFASWPGTPAPILGCRGAPVCAPSPCLHDGACRDLFDAFACACGPGWEGPRCEAHVDPCHSAPCARGRCHTHPDGRFECRCPPGFGGPRCRLPVPSKECSLNVTCLDGSPCEGGSPAANCSCLEGLAGQRCQVPTLPCEANPCLNGGTCRAAGGVSECICNARFSGQFCEVAKGLPLPLPFPLLEVAVPAACACLLLLLLGLLSGILAARKRRQSEGTYSPSQQEVAGARLEMDSVLKVPPEERLI

SEQ ID NO: 227 - protein, 1220 aa, Homo sapiens
  CRUMBS CELL POLARITY COMPLEX COMPONENT 2 (CRB2), ISOFORM X2 <Accession No.: XP_011516860.1>
MEPRGCATQPCHHGALCVPQGPDPTGFRCYCVPGFQGPRCELDIDECASRPCHHGATCRNLADRYECHCPLGYAGVTCEMEVDECASAPCLHGGSCLDGVGSFRCVCAPGYGGTRCQLDLDECQSQPCAHGGTCHDLVNGFRCDCAGTGYEGTHCEREVLECASAPCEHNASCLEGLGSFRCLCWPGYSGELCEVDEDECASSPCQHGGRCLQRSDPALYGGVQAAFPGAFSFRHAAGFLCHCPPGFEGADCGVEVDECASRPCLNGGHCQDLPNGFQCHCPDGYAGPTCEEDVDECLSDPCLHGGTCSDTVAGYICRCPETWGGRDCSVQLTGCQGHTCPLAATCIPIFESGVHSYVCHCPPGTHGPFCGQNTTFSVMAGSPIQASVPAGGPLGLALRFRTTLPAGTLATRNDTKESLELALVAATLQATLWSYSTTVLVLRLPDLALNDGHWHQVEVVLHLATLELRLWHEGCPARLCVASGPVALASTASATPLPAGISSAQLGDATFAGCLQDVRVDGHLLLPEDLGENVLLGCERREQCRPLPCVHGGSCVDLWTHFRCDCARPHRGPTCADEIPAATFGLGGAPSSASFLLQELPGPNLTVSFLLRTRESAGLLLQFANDSAAGLTVFLSEGRIRAEVPGSPAVVLPGRWDDGLRHLVMLSFGPDQLQDLGQHVHVGGRLLAADSQPWGGPFRGCLQDLRLDGCHLPFFPLPLDNSSQPSELGGRQSWNLTAGCVSEDMCSPDPCFNGGTCLVTWNDFHCTCPANFTGPTCAQQLWCPGQPCLPPATCEEVPDGFVCVAEATFREGPPAAFSGHNASSGRLLGGLSLAFRTRDSEAWLLRAAAGALEGVWLAVRNGSLAGGVRGGHGLPGAVLPIPGPRVADGAWHRVRLAMERPAATTSRWLLWLDGAATPVALRGLASDLGFLQGPGAVRILLAENFTGCLGRVALGGLPLPLARPRPGAAPGAREHFASWPGTPAPILGCRGAPVCAPSPCLHDGACRDLFDAFACACGPGWEGPRCEAHVDPCHSAPCARGRCHTHPDGRFECRCPPGFGGPRCRLPVPSKECSLNVTCLDGSPCEGGSPAANCSCLEGLAGQRCQVPTLPCEANPCLNGGTCRAAGGVSECICNARFSGQFCEVAKGLPLPLPFPLLEVAVPAACACLLLLLLGLLSGILAARKRRQSEGTYSPSQQEVAGARLEMDSVLKVPPEERLI

SEQ ID NO: 228 - protein, 1084 aa, Homo sapiens
  HISTONE DEACETYLASE 4 (HDAC4) <Accession No.: NP_006028.2>
MSSQSHPDGLSGRDQPVELLNPARVNHMPSTVDVATALPLQVAPSAVPMDLRLDHQFSLPVAEPALREQQLQQELLALKQKQQIQRQILIAEFQRQHEQLSRQHEAQLHEHIKQQQEMLAMKHQQELLEHQRKLERHRQEQELEKQHREQKLQQLKNKEKGKESAVASTEVKMKLQEFVLNKKKALAHRNLNHCISSDPRYWYGKTQHSSLDQSSPPQSGVSTSYNHPVLGMYDAKDDFPLRKTASEPNLKLRSRLKQKVAERRSSPLLRRKDGPVVTALKKRPLDVTDSACSSAPGSGPSSPNNSSGSVSAENGIAPAVPSIPAETSLAHRLVAREGSAAPLPLYTSPSLPNITLGLPATGPSAGTAGQQDAERLTLPALQQRLSLFPGTHLTPYLSTSPLERDGGAAHSPLLQHMVLLEQPPAQAPLVTGLGALPLHAQSLVGADRVSPSIHKLRQHRPLGRTQSAPLPQNAQALQHLVIQQQHQQFLEKHKQQFQQQQLQMNKIIPKPSEPARQPESHPEETEEELREHQALLDEPYLDRLPGQKEAHAQAGVQVKQEPIESDEEEAEPPREVEPGQRQPSEQELLFRQQALLLEQQRIHQLRNYQASMEAAGIPVSFGGHRPLSRAQSSPASATFPVSVQEPPTKPRFTTGLVYDTLMLKHQCTCGSSSSHPEHAGRIQSIWSRLQETGLRGKCECIRGRKATLEELQTVHSEAHTLLYGTNPLNRQKLDSKKLLGSLASVFVRLPCGGVGVDSDTIWNEVHSAGAARLAVGCVVELVFKVATGELKNGFAVVRPPGHHAEESTPMGFCYFNSVAVAAKLLQQRLSVSKILIVDWDVHHGNGTQQAFYSDPSVLYMSLHRYDDGNFFPGSGAPDEVGTGPGVGFNVNMAFTGGLDPPMGDAEYLAAFRTVVMPIASEFAPDVVLVSSGFDAVEGHPTPLGGYNLSARCFGYLTKQLMGLAGGRIVLALEGGHDLTAICDASEACVSALLGNELDPLPEKVLQQRPNANAVRSMEKVMEIHSKYWRCLQRTTSTAGRSLIEAQTCENEEAETVTAMASLSVGVKPAEKRPDEEPMEEEPPL

SEQ ID NO: 229 - protein, 1108 aa, Homo sapiens
  HISTONE DEACETYLASE 4 (HDAC4) ISOFORM X2 <Accession No.: XP_006712940.1>
MNIDLCAFEIQKTSSPGYEVWFRKQYLAVDGDGLSGRDQPVELLNPARVNHMPSTVDVATALPLQVAPSAVPMDLRLDHQFSLPVAEPALREQQLQQELLALKQKQQIQRQILIAEFQRQHEQLSRQHEAQLHEHIKQQQEMLAMKHQQELLEHQRKLERHRQEQELEKQHREQKLQQLKNKEKGKESAVASTEVKMKLQEFVLNKKKALAHRNLNHCISSDPRYWYGKTQHSSLDQSSPPQSGVSTSYNHPVLGMYDAKDDFPLRKTASEPNLKLRSRLKQKVAERRSSPLLRRKDGPVVTALKKRPLDVTDSACSSAPGSGPSSPNNSSGSVSAENGIAPAVPSIPAETSLAHRLVAREGSAAPLPLYTSPSLPNITLGLPATGPSAGTAGQQDAERLTLPALQQRLSLFPGTHLTPYLSTSPLERDGGAAHSPLLQHMVLLEQPPAQAPLVTGLGALPLHAQSLVGADRVSPSIHKLRQHRPLGRTQSAPLPQNAQALQHLVIQQQHQQFLEKHKQQFQQQQLQMNKIIPKPSEPARQPESHPEETEEELREHQALLDEPYLDRLPGQKEAHAQAGVQVKQEPIESDEEEAEPPREVEPGQRQPSEQELLFRQQALLLEQQRIHQLRNYQASMEAAGIPVSFGGHRPLSRAQSSPASATFPVSVQEPPTKPRFTTGLVYDTLMLKHQCTCGSSSSHPEHAGRIQSIWSRLQETGLRGKCECIRGRKATLEELQTVHSEAHTLLYGTNPLNRQKLDSKKLLGSLASVFVRLPCGGVGVDSDTIWNEVHSAGAARLAVGCVVELVFKVATGELKNGFAVVRPPGHHAEESTPMGFCYFNSVAVAAKLLQQRLSVSKILIVDWDVHHGNGTQQAFYSDPSVLYMSLHRYDDGNFFPGSGAPDEVGTGPGVGFNVNMAFTGGLDPPMGDAEYLAAFRTVVMPIASEFAPDVVLVSSGFDAVEGHPTPLGGYNLSARCFGYLTKQLMGLAGGRIVLALEGGHDLTAICDASEACVSALLGNELDPLPEKVLQQRPNANAVRSMEKVMEIHSKYWRCLQRTTSTAGRSLIEAQTCENEEAETVTAMASLSVGVKPAEKRPDEEPMEEEPPL

SEQ ID NO: 230 - protein, 1108 aa, Homo sapiens
  HISTONE DEACETYLASE 4 (HDAC4) ISOFORM X3 <Accession No.: XP_011510520.1>
MNIDLCAFEIQKTSSPGYEVWFRKQYLAVDGDGLSGRDQPVELLNPARVNHMPSTVDVATALPLQVAPSAVPMDLRLDHQFSLPVAEPALREQQLQQELLALKQKQQIQRQILIAEFQRQHEQLSRQHEAQLHEHIKQQQEMLAMKHQQELLEHQRKLERHRQEQELEKQHREQKLQQLKNKEKGKESAVASTEVKMKLQEFVLNKKKALAHRNLNHCISSDPRYWYGKTQHSSLDQSSPPQSGVSTSYNHPVLGMYDAKDDFPLRKTASEPNLKLRSRLKQKVAERRSSPLLRRKDGPVVTALKKRPLDVTDSACSSAPGSGPSSPNNSSGSVSAENGIAPAVPSIPAETSLAHRLVAREGSAAPLPLYTSPSLPNITLGLPATGPSAGTAGQQDAERLTLPALQQRLSLFPGTHLTPYLSTSPLERDGGAAHSPLLQHMVLLEQPPAQAPLVTDWYLSGLGALPLHAQSLVGADRVSPSIHKLRQHRPLGRTQSAPLPQNAQALQHLVIQQQHQQFLEKHKQQFQQQQLQMNKIIPKPSEPARQPESHPEETEEELREHQALLDEPYLDRLPGQKEAHAQAGVQVKQEPIESDEEEAEPPREVEPGQRQPSEQELLFRQQALLLEQQRIHQLRNYQASMEAAGIPVSFGGHRPLSRAQSSPASATFPVSVQEPPTKPRFTTGLVYDTLMLKHQCTCGSSSSHPEHAGRIQSIWSRLQETGLRGKCECIRGRKATLEELQTVHSEAHTLLYGTNPLNRQKLDSSLASVFVRLPCGGVGVDSDTIWNEVHSAGAARLAVGCVVELVFKVATGELKNGFAVVRPPGHHAEESTPMGFCYFNSVAVAAKLLQQRLSVSKILIVDWDVHHGNGTQQAFYSDPSVLYMSLHRYDDGNFFPGSGAPDEVGTGPGVGFNVNMAFTGGLDPPMGDAEYLAAFRTVVMPIASEFAPDVVLVSSGFDAVEGHPTPLGGYNLSARCFGYLTKQLMGLAGGRIVLALEGGHDLTAICDASEACVSALLGNELDPLPEKVLQQRPNANAVRSMEKVMEIHSKYWRCLQRTTSTAGRSLIEAQTCENEEAETVTAMASLSVGVKPAEKRPDEEPMEEEPPL

SEQ ID NO: 231 - protein, 1103 aa, Homo sapiens
  HISTONE DEACETYLASE 4 (HDAC4) ISOFORM X4 <Accession No.: XP_011510521.1>
MNIDLCAFEIQKTSSPGYEVWFRKQYLAVDGDGLSGRDQPVELLNPARVNHMPSTVDVATALPLQVAPSAVPMDLRLDHQFSLPVAEPALREQQLQQELLALKQKQQIQRQILIAEFQRQHEQLSRQHEAQLHEHIKQQQEMLAMKHQQELLEHQRKLERHRQEQELEKQHREQKLQQLKNKEKGKESAVASTEVKMKLQEFVLNKKKALAHRNLNHCISSDPRYWYGKTQHSSLDQSSPPQSGVSTSYNHPVLGMYDAKDDFPLRKTASEPNLKLRSRLKQKVAERRSSPLLRRKDGPVVTALKKRPLDVTDSACSSAPGSGPSSPNNSSGSVSAENGIAPAVPSIPAETSLAHRLVAREGSAAPLPLYTSPSLPNITLGLPATGPSAGTAGQQDAERLTLPALQQRLSLFPGTHLTPYLSTSPLERDGGAAHSPLLQHMVLLEQPPAQAPLVTGLGALPLHAQSLVGADRVSPSIHKLRQHRPLGRTQSAPLPQNAQALQHLVIQQQHQQFLEKHKQQFQQQQLQMNKIIPKPSEPARQPESHPEETEEELREHQALLDEPYLDRLPGQKEAHAQAGVQVKQEPIESDEEEAEPPREVEPGQRQPSEQELLFRQQALLLEQQRIHQLRNYQASMEAAGIPVSFGGHRPLSRAQSSPASATFPVSVQEPPTKPRFTTGLVYDTLMLKHQCTCGSSSSHPEHAGRIQSIWSRLQETGLRGKCECIRGRKATLEELQTVHSEAHTLLYGTNPLNRQKLDSSLASVFVRLPCGGVGVDSDTIWNEVHSAGAARLAVGCVVELVFKVATGELKNGFAVVRPPGHHAEESTPMGFCYFNSVAVAAKLLQQRLSVSKILIVDWDVHHGNGTQQAFYSDPSVLYMSLHRYDDGNFFPGSGAPDEVGTGPGVGFNVNMAFTGGLDPPMGDAEYLAAFRTVVMPIASEFAPDVVLVSSGFDAVEGHPTPLGGYNLSARCFGYLTKQLMGLAGGRIVLALEGGHDLTAICDASEACVSALLGNELDPLPEKVLQQRPNANAVRSMEKVMEIHSKYWRCLQRTTSTAGRSLIEAQTCENEEAETVTAMASLSVGVKPAEKRPDEEPMEEEPPL

SEQ ID NO: 232 - protein, 1090 aa, Homo sapiens
  HISTONE DEACETYLASE 4 (HDAC4) ISOFORM X5 <Accession No.: XP_011510522.1>
MRKLGPREDGLSGRDQPVELLNPARVNHMPSTVDVATALPLQVAPSAVPMDLRLDHQFSLPVAEPALREQQLQQELLALKQKQQIQRQILIAEFQRQHEQLSRQHEAQLHEHIKQQQEMLAMKHQQELLEHQRKLERHRQEQELEKQHREQKLQQLKNKEKGKESAVASTEVKMKLQEFVLNKKKALAHRNLNHCISSDPRYWYGKTQHSSLDQSSPPQSGVSTSYNHPVLGMYDAKDDFPLRKTASEPNLKLRSRLKQKVAERRSSPLLRRKDGPVVTALKKRPLDVTDSACSSAPGSGPSSPNNSSGSVSAENGIAPAVPSIPAETSLAHRLVAREGSAAPLPLYTSPSLPNITLGLPATGPSAGTAGQQDAERLTLPALQQRLSLFPGTHLTPYLSTSPLERDGGAAHSPLLQHMVLLEQPPAQAPLVTDWYLSGLGALPLHAQSLVGADRVSPSIHKLRQHRPLGRTQSAPLPQNAQALQHLVIQQQHQQFLEKHKQQFQQQQLQMNKIIPKPSEPARQPESHPEETEEELREHQALLDEPYLDRLPGQKEAHAQAGVQVKQEPIESDEEEAEPPREVEPGQRQPSEQELLFRQQALLLEQQRIHQLRNYQASMEAAGIPVSFGGHRPLSRAQSSPASATFPVSVQEPPTKPRFTTGLVYDTLMLKHQCTCGSSSSHPEHAGRIQSIWSRLQETGLRGKCECIRGRKATLEELQTVHSEAHTLLYGTNPLNRQKLDSKKLLGSLASVFVRLPCGGVGVDSDTIWNEVHSAGAARLAVGCVVELVFKVATGELKNGFAVVRPPGHHAEESTPMGFCYFNSVAVAAKLLQQRLSVSKILIVDWDVHHGNGTQQAFYSDPSVLYMSLHRYDDGNFFPGSGAPDEVGTGPGVGFNVNMAFTGGLDPPMGDAEYLAAFRTVVMPIASEFAPDVVLVSSGFDAVEGHPTPLGGYNLSARCFGYLTKQLMGLAGGRIVLALEGGHDLTAICDASEACVSALLGNELDPLPEKVLQQRPNANAVRSMEKVMEIHSKYWRCLQRTTSTAGRSLIEAQTCENEEAETVTAMASLSVGVKPAEKRPDEEPMEEEPPL

SEQ ID NO: 233 - protein, 1089 aa, Homo sapiens
  HISTONE DEACETYLASE 4 (HDAC4) ISOFORM X6 <Accession No.: XP_011510523.1>
MSSQSHPDGLSGRDQPVELLNPARVNHMPSTVDVATALPLQVAPSAVPMDLRLDHQFSLPVAEPALREQQLQQELLALKQKQQIQRQILIAEFQRQHEQLSRQHEAQLHEHIKQQQEMLAMKHQQELLEHQRKLERHRQEQELEKQHREQKLQQLKNKEKGKESAVASTEVKMKLQEFVLNKKKALAHRNLNHCISSDPRYWYGKTQHSSLDQSSPPQSGVSTSYNHPVLGMYDAKDDFPLRKTASEPNLKLRSRLKQKVAERRSSPLLRRKDGPVVTALKKRPLDVTDSACSSAPGSGPSSPNNSSGSVSAENGIAPAVPSIPAETSLAHRLVAREGSAAPLPLYTSPSLPNITLGLPATGPSAGTAGQQDAERLTLPALQQRLSLFPGTHLTPYLSTSPLERDGGAAHSPLLQHMVLLEQPPAQAPLVTDWYLSGLGALPLHAQSLVGADRVSPSIHKLRQHRPLGRTQSAPLPQNAQALQHLVIQQQHQQFLEKHKQQFQQQQLQMNKIIPKPSEPARQPESHPEETEEELREHQALLDEPYLDRLPGQKEAHAQAGVQVKQEPIESDEEEAEPPREVEPGQRQPSEQELLFRQQALLLEQQRIHQLRNYQASMEAAGIPVSFGGHRPLSRAQSSPASATFPVSVQEPPTKPRFTTGLVYDTLMLKHQCTCGSSSSHPEHAGRIQSIWSRLQETGLRGKCECIRGRKATLEELQTVHSEAHTLLYGTNPLNRQKLDSKKLLGSLASVFVRLPCGGVGVDSDTIWNEVHSAGAARLAVGCVVELVFKVATGELKNGFAVVRPPGHHAEESTPMGFCYFNSVAVAAKLLQQRLSVSKILIVDWDVHHGNGTQQAFYSDPSVLYMSLHRYDDGNFFPGSGAPDEVGTGPGVGFNVNMAFTGGLDPPMGDAEYLAAFRTVVMPIASEFAPDVVLVSSGFDAVEGHPTPLGGYNLSARCFGYLTKQLMGLAGGRIVLALEGGHDLTAICDASEACVSALLGNELDPLPEKVLQQRPNANAVRSMEKVMEIHSKYWRCLQRTTSTAGRSLIEAQTCENEEAETVTAMASLSVGVKPAEKRPDEEPMEEEPPL

SEQ ID NO: 234 - protein, 1084 aa, Homo sapiens
  HISTONE DEACETYLASE 4 (HDAC4) ISOFORM X7 <Accession No.: XP_011510526.1>
MFDGLSGRDQPVELLNPARVNHMPSTVDVATALPLQVAPSAVPMDLRLDHQFSLPVAEPALREQQLQQELLALKQKQQIQRQILIAEFQRQHEQLSRQHEAQLHEHIKQQQEMLAMKHQQELLEHQRKLERHRQEQELEKQHREQKLQQLKNKEKGKESAVASTEVKMKLQEFVLNKKKALAHRNLNHCISSDPRYWYGKTQHSSLDQSSPPQSGVSTSYNHPVLGMYDAKDDFPLRKTASEPNLKLRSRLKQKVAERRSSPLLRRKDGPVVTALKKRPLDVTDSACSSAPGSGPSSPNNSSGSVSAENGIAPAVPSIPAETSLAHRLVAREGSAAPLPLYTSPSLPNITLGLPATGPSAGTAGQQDAERLTLPALQQRLSLFPGTHLTPYLSTSPLERDGGAAHSPLLQHMVLLEQPPAQAPLVTDWYLSGLGALPLHAQSLVGADRVSPSIHKLRQHRPLGRTQSAPLPQNAQALQHLVIQQQHQQFLEKHKQQFQQQQLQMNKIIPKPSEPARQPESHPEETEEELREHQALLDEPYLDRLPGQKEAHAQAGVQVKQEPIESDEEEAEPPREVEPGQRQPSEQELLFRQQALLLEQQRIHQLRNYQASMEAAGIPVSFGGHRPLSRAQSSPASATFPVSVQEPPTKPRFTTGLVYDTLMLKHQCTCGSSSSHPEHAGRIQSIWSRLQETGLRGKCECIRGRKATLEELQTVHSEAHTLLYGTNPLNRQKLDSKKLLGSLASVFVRLPCGGVGVDSDTIWNEVHSAGAARLAVGCVVELVFKVATGELKNGFAVVRPPGHHAEESTPMGFCYFNSVAVAAKLLQQRLSVSKILIVDWDVHHGNGTQQAFYSDPSVLYMSLHRYDDGNFFPGSGAPDEVGTGPGVGFNVNMAFTGGLDPPMGDAEYLAAFRTVVMPIASEFAPDVVLVSSGFDAVEGHPTPLGGYNLSARCFGYLTKQLMGLAGGRIVLALEGGHDLTAICDASEACVSALLGNELDPLPEKVLQQRPNANAVRSMEKVMEIHSKYWRCLQRTTSTAGRSLIEAQTCENEEAETVTAMASLSVGVKPAEKRPDEEPMEEEPPL

SEQ ID NO: 235 - protein, 1079 aa, Homo sapiens
  HISTONE DEACETYLASE 4 (HDAC4) ISOFORM X8 <Accession No.: XP_011510527.1>
MFDGLSGRDQPVELLNPARVNHMPSTVDVATALPLQVAPSAVPMDLRLDHQFSLPVAEPALREQQLQQELLALKQKQQIQRQILIAEFQRQHEQLSRQHEAQLHEHIKQQQEMLAMKHQQELLEHQRKLERHRQEQELEKQHREQKLQQLKNKEKGKESAVASTEVKMKLQEFVLNKKKALAHRNLNHCISSDPRYWYGKTQHSSLDQSSPPQSGVSTSYNHPVLGMYDAKDDFPLRKTASEPNLKLRSRLKQKVAERRSSPLLRRKDGPVVTALKKRPLDVTDSACSSAPGSGPSSPNNSSGSVSAENGIAPAVPSIPAETSLAHRLVAREGSAAPLPLYTSPSLPNITLGLPATGPSAGTAGQQDAERLTLPALQQRLSLFPGTHLTPYLSTSPLERDGGAAHSPLLQHMVLLEQPPAQAPLVTGLGALPLHAQSLVGADRVSPSIHKLRQHRPLGRTQSAPLPQNAQALQHLVIQQQHQQFLEKHKQQFQQQQLQMNKIIPKPSEPARQPESHPEETEEELREHQALLDEPYLDRLPGQKEAHAQAGVQVKQEPIESDEEEAEPPREVEPGQRQPSEQELLFRQQALLLEQQRIHQLRNYQASMEAAGIPVSFGGHRPLSRAQSSPASATFPVSVQEPPTKPRFTTGLVYDTLMLKHQCTCGSSSSHPEHAGRIQSIWSRLQETGLRGKCECIRGRKATLEELQTVHSEAHTLLYGTNPLNRQKLDSKKLLGSLASVFVRLPCGGVGVDSDTIWNEVHSAGAARLAVGCVVELVFKVATGELKNGFAVVRPPGHHAEESTPMGFCYFNSVAVAAKLLQQRLSVSKILIVDWDVHHGNGTQQAFYSDPSVLYMSLHRYDDGNFFPGSGAPDEVGTGPGVGFNVNMAFTGGLDPPMGDAEYLAAFRTVVMPIASEFAPDVVLVSSGFDAVEGHPTPLGGYNLSARCFGYLTKQLMGLAGGRIVLALEGGHDLTAICDASEACVSALLGNELDPLPEKVLQQRPNANAVRSMEKVMEIHSKYWRCLQRTTSTAGRSLIEAQTCENEEAETVTAMASLSVGVKPAEKRPDEEPMEEEPPL

SEQ ID NO: 236 - protein, 1069 aa, Homo sapiens
  HISTONE DEACETYLASE 4 (HDAC4) ISOFORM X9 <Accession No.: XP_016860883.1>
MNIDLCAFEIQKTSSPGYEVWFRKQYLAVDGDGLSGRDQPVELLNPARVNHMPSTVDVATALPLQVAPSAVPMDLRLDHQFSLPVAEPALREQQLQQELLALKQKQQIQRQILIAEFQRQHEQLSRQHEAQLHEHIKQQQEMLAMKHQQELLEHQRKLERHRQEQELEKQHREQKLQQLKNKEKGKESAVASTEVKMKLQEFVLNKKKALAHRNLNHCISSDPRYWYGKTQHSSLDQSSPPQSGVSTSYNHPVLGMYDAKDDFPLRKTDSACSSAPGSGPSSPNNSSGSVSAENGIAPAVPSIPAETSLAHRLVAREGSAAPLPLYTSPSLPNITLGLPATGPSAGTAGQQDAERLTLPALQQRLSLFPGTHLTPYLSTSPLERDGGAAHSPLLQHMVLLEQPPAQAPLVTDWYLSGLGALPLHAQSLVGADRVSPSIHKLRQHRPLGRTQSAPLPQNAQALQHLVIQQQHQQFLEKHKQQFQQQQLQMNKIIPKPSEPARQPESHPEETEEELREHQALLDEPYLDRLPGQKEAHAQAGVQVKQEPIESDEEEAEPPREVEPGQRQPSEQELLFRQQALLLEQQRIHQLRNYQASMEAAGIPVSFGGHRPLSRAQSSPASATFPVSVQEPPTKPRFTTGLVYDTLMLKHQCTCGSSSSHPEHAGRIQSIWSRLQETGLRGKCECIRGRKATLEELQTVHSEAHTLLYGTNPLNRQKLDSKKLLGSLASVFVRLPCGGVGVDSDTIWNEVHSAGAARLAVGCVVELVFKVATGELKNGFAVVRPPGHHAEESTPMGFCYFNSVAVAAKLLQQRLSVSKILIVDWDVHHGNGTQQAFYSDPSVLYMSLHRYDDGNFFPGSGAPDEVGTGPGVGFNVNMAFTGGLDPPMGDAEYLAAFRTVVMPIASEFAPDVVLVSSGFDAVEGHPTPLGGYNLSARCFGYLTKQLMGLAGGRIVLALEGGHDLTAICDASEACVSALLGNELDPLPEKVLQQRPNANAVRSMEKVMEIHSKYWRCLQRTTSTAGRSLIEAQTCENEEAETVTAMASLSVGVKPAEKRPDEEPMEEEPPL

SEQ ID NO: 237 - protein, 1065 aa, Homo sapiens
  HISTONE DEACETYLASE 4 (HDAC4) ISOFORM X10 <Accession No.: XP_011510528.1>
MSSQSHPVDVATALPLQVAPSAVPMDLRLDHQFSLPVAEPALREQQLQQELLALKQKQQIQRQILIAEFQRQHEQLSRQHEAQLHEHIKQQQEMLAMKHQQELLEHQRKLERHRQEQELEKQHREQKLQQLKNKEKGKESAVASTEVKMKLQEFVLNKKKALAHRNLNHCISSDPRYWYGKTQHSSLDQSSPPQSGVSTSYNHPVLGMYDAKDDFPLRKTASEPNLKLRSRLKQKVAERRSSPLLRRKDGPVVTALKKRPLDVTDSACSSAPGSGPSSPNNSSGSVSAENGIAPAVPSIPAETSLAHRLVAREGSAAPLPLYTSPSLPNITLGLPATGPSAGTAGQQDAERLTLPALQQRLSLFPGTHLTPYLSTSPLERDGGAAHSPLLQHMVLLEQPPAQAPLVTDWYLSGLGALPLHAQSLVGADRVSPSIHKLRQHRPLGRTQSAPLPQNAQALQHLVIQQQHQQFLEKHKQQFQQQQLQMNKIIPKPSEPARQPESHPEETEEELREHQALLDEPYLDRLPGQKEAHAQAGVQVKQEPIESDEEEAEPPREVEPGQRQPSEQELLFRQQALLLEQQRIHQLRNYQASMEAAGIPVSFGGHRPLSRAQSSPASATFPVSVQEPPTKPRFTTGLVYDTLMLKHQCTCGSSSSHPEHAGRIQSIWSRLQETGLRGKCECIRGRKATLEELQTVHSEAHTLLYGTNPLNRQKLDSKKLLGSLASVFVRLPCGGVGVDSDTIWNEVHSAGAARLAVGCVVELVFKVATGELKNGFAVVRPPGHHAEESTPMGFCYFNSVAVAAKLLQQRLSVSKILIVDWDVHHGNGTQQAFYSDPSVLYMSLHRYDDGNFFPGSGAPDEVGTGPGVGFNVNMAFTGGLDPPMGDAEYLAAFRTVVMPIASEFAPDVVLVSSGFDAVEGHPTPLGGYNLSARCFGYLTKQLMGLAGGRIVLALEGGHDLTAICDASEACVSALLGNELDPLPEKVLQQRPNANAVRSMEKVMEIHSKYWRCLQRTTSTAGRSLIEAQTCENEEAETVTAMASLSVGVKPAEKRPDEEPMEEEPPL

SEQ ID NO: 238 - protein, 1062 aa, Homo sapiens
  HISTONE DEACETYLASE 4 (HDAC4) ISOFORM X11 <Accession No.: XP_006712943.1>
MPSTVDVATALPLQVAPSAVPMDLRLDHQFSLPVAEPALREQQLQQELLALKQKQQIQRQILIAEFQRQHEQLSRQHEAQLHEHIKQQQEMLAMKHQQELLEHQRKLERHRQEQELEKQHREQKLQQLKNKEKGKESAVASTEVKMKLQEFVLNKKKALAHRNLNHCISSDPRYWYGKTQHSSLDQSSPPQSGVSTSYNHPVLGMYDAKDDFPLRKTASEPNLKLRSRLKQKVAERRSSPLLRRKDGPVVTALKKRPLDVTDSACSSAPGSGPSSPNNSSGSVSAENGIAPAVPSIPAETSLAHRLVAREGSAAPLPLYTSPSLPNITLGLPATGPSAGTAGQQDAERLTLPALQQRLSLFPGTHLTPYLSTSPLERDGGAAHSPLLQHMVLLEQPPAQAPLVTDWYLSGLGALPLHAQSLVGADRVSPSIHKLRQHRPLGRTQSAPLPQNAQALQHLVIQQQHQQFLEKHKQQFQQQQLQMNKIIPKPSEPARQPESHPEETEEELREHQALLDEPYLDRLPGQKEAHAQAGVQVKQEPIESDEEEAEPPREVEPGQRQPSEQELLFRQQALLLEQQRIHQLRNYQASMEAAGIPVSFGGHRPLSRAQSSPASATFPVSVQEPPTKPRFTTGLVYDTLMLKHQCTCGSSSSHPEHAGRIQSIWSRLQETGLRGKCECIRGRKATLEELQTVHSEAHTLLYGTNPLNRQKLDSKKLLGSLASVFVRLPCGGVGVDSDTIWNEVHSAGAARLAVGCVVELVFKVATGELKNGFAVVRPPGHHAEESTPMGFCYFNSVAVAAKLLQQRLSVSKILIVDWDVHHGNGTQQAFYSDPSVLYMSLHRYDDGNFFPGSGAPDEVGTGPGVGFNVNMAFTGGLDPPMGDAEYLAAFRTVVMPIASEFAPDVVLVSSGFDAVEGHPTPLGGYNLSARCFGYLTKQLMGLAGGRIVLALEGGHDLTAICDASEACVSALLGNELDPLPEKVLQQRPNANAVRSMEKVMEIHSKYWRCLQRTTSTAGRSLIEAQTCENEEAETVTAMASLSVGVKPAEKRPDEEPMEEEPPL

SEQ ID NO: 239 - protein, 348 aa, Homo sapiens [sequence omitted]

SEQ ID NO: 240 - protein, 257 aa, Homo sapiens
  NERVE GROWTH FACTOR (NGF) <Accession No.: CAA37703.1>
MSILFYVIFLAYLRGIQGNNMDQRSLPEDSLNSLIIKLIQADILKNKLSKQMVDVKENYQSTLPKAEAPREPERGGPAKSAFQPVIAMDTELLRQQRRYNSPRVLLSDSTPLEPPPLYLMEDYVGSPVVANRTSRRKRYAEHKSHRGEYSVCDSESLWVTDKSSAIDIRGHQVTVLGEIKTGNSPVKQYFYETRCKEARPVKNGCRGIDDKHWNSQCKTSQTYVRALTSENNKLVGWRWIRIDTSCVCALSRKIGRT

SEQ ID NO: 241 - protein, 589 aa, Homo sapiens
  NUCLEAR FACTOR, ERYTHROID 2 LIKE 2 (NRF2) <Accession No.: AAB32188.1>
MDLIDILWRQDIDLGVSREVFDFSQRRKEYELEKQKKLEKERQEQLQKEQEKAFFTQLQLDEETGEFLPIQPAQHTQSETSGSANYSQVAHIPKSDALYFDDCMQLLAQTFPFVDDNEVSSATFQSLVPDIPGHIESPVFIATNQAQSPETSVAQVAPVDLDGMQQDIEQVWEELLSIPELQCLNIENDKLVETTMVPSPEAKLTEVDNYHFYSSIPSMEKEVGNCSPHFLNAFEDSFSSILSTEDPNQLTVNSLNSDATVNTDFGDEFYSAFIAEPSISNSMPSPATLSHSLSELLNGPIDVSDLSLCKAFNQNHPESTAEFNDSDSGISLNTSPSVASPEHSVESSSYGDTLLGLSDSEVEELDSAPGSVKQNGPKTPVHSSGDMVQPLSPSQGQSTHVHDAQCENTPEKELPVSPGHRKTPFTKDKHSSRLEAHLTRDELRAKALHIPFPVEKIINLPVVDFNEMMSKEQFNEAQLALIRDIRRRGKNKVAAQNCRKRKLENIVELEQDLDHLKDEKEKLLKEKGENDKSLHLLKKQLSTLYLEVFSMLRDEDGKPYSPSEYSLQQTRDGNVFLVPKSKKPDVKKN

SEQ ID NO: 242 - protein, 210 aa, Homo sapiens
  GLUTATHIONE S-TRANSFERASE PI 1 (GSTP1) <Accession No.: AAH10915.1>
MPPYTVVYFPVRGRCAALRMLLADQGQSWKEEVVTVETWQEGSLKASCLYGQLPKFQDGDLTLYQSNTILRHLGRTLGLYGKDQQEAALVDMVNDGVEDLRCKYVSLIYTNYEAGKDDYVKALPGQLKPFETLLSQNQGGKTFIVGDQISFADYNLLDLLLIHEVLAPGCLDAFPLLSAYVGRLSARPKLKAFLASPEYVNLPINGNGKQ

SEQ ID NO: 243 - protein, 212 aa, Homo sapiens
  ROD-DERIVED CONE VIABILITY FACTOR (RDCVF) <Accession No.: NP_612463.1>
MASLFSGRILIRNNSDQDELDTEAEVSRRLENRLVLLFFGAGACPQCQAFVPILKDFFVRLTDEFYVLRAAQLALVYVSQDSTEEQQDLFLKDMPKKWLFLPFEDDLRRDLGRQFSVERLPAVVVLKPDGDVLTRDGADEIQRLGTACFANWQEAAEVLDRNFQLPEDLEDQEPRSLTECLRRHKYRVEKAARGGRDPGGGGGEEGGAGGLF

SEQ ID NO: 244 - protein, 317 aa, Homo sapiens
  RETINALDEHYDE BINDING PROTEIN 1 (RLBP1) <Accession No.: EAX02038.1>
MSEGVGTFRMVPEEEQELRAQLEQLTTKDHGPVFGPCSQLPRHTLQKAKDELNEREETREEAVRELQEMVQAQAASGEELAVAVAERVQEKDSGFFLRFIRARKFNVGRAYELLRGYVNFRLQYPELFDSLSPEAVRCTIEAGYPGVLSSRDKYGRVVMLFNIENWQSQEITFDEILQAYCFILEKLLENEETQINGFCIIENFKGFTMQQAASLRTSDLRKMVDMLQDSFPARFKAIHFIHQPWYFTTTYNVVKPFLKSKLLERVFVHGDDLSGFYQEIDENILPSDFGGTLPKYDGKAVAEQLFGPQAQAENTAF

SEQ ID NO: 245 - protein, 424 aa, Homo sapiens [sequence omitted]

SEQ ID NO: 246 - protein, 1016 aa, Homo sapiens
  NLR FAMILY PYRIN DOMAIN CONTAINING 3 (NLRP3) <Accession No.: AAI43360.1>
MKMASTRCKLARYLEDLEDVDLKKFKMHLEDYPPQKGCIPLPRGQTEKADHVDLATLMIDFNGEEKAWAMAVWIFAAINRRDLYEKAKRDEPKWGSDNARVSNPTVICQEDSIEEEWMGLLEYLSRISICKMKKDYRKKYRKYVRSRFQCIEDRNARLGESVSLNKRYTRLRLIKEHRSQQEREQELLAIGKTKTCESPVSPIKMELLFDPDDEHSEPVHTVVFQGAAGIGKTILARKMMLDWASGTLYQDRFDYLFYIHCREVSLVTQRSLGDLIMSCCPDPNPPIHKIVRKPSRILFLMDGFDELQGAFDEHIGPLCTDWQKAERGDILLSSLIRKKLLPEASLLITTRPVALEKLQHLLDHPRHVEILGFSEAKRKEYFFKYFSDEAQARAAFSLIQENEVLFTMCFIPLVCWIVCTGLKQQMESGKSLAQTSKTTTAVYVFFLSSLLQPRGGSQEHGLCAHLWGLCSLAADGIWNQKILFEESDLRNHGLQKADVSAFLRMNLFQKEVDCEKFYSFIHMTFQEFFAAMYYLLEEEKEGRTNVPGSRLKLPSRDVTVLLENYGKFEKGYLIFVVRFLFGLVNQERTSYLEKKLSCKISQQIRLELLKWIEVKAKAKKLQIQPSQLELFYCLYEMQEEDFVQRAMDYFPKIEINLSTRMDHMVSSFCIENCHRVESLSLGFLHNMPKEEEEEEKEGRHLDMVQCVLPSSSHAACSHGLVNSHLTSSFCRGLFSVLSTSQSLTELDLSDNSLGDPGMRVLCETLQHPGCNIRRLCNQKLVELDLSDNALGDFGIRLLCVGLKHLLCNLKKLWLVSCCLTSACCQDLASVLSTSHSLTRLYVGENALGDSGVAILCEKAKNPQCNLQKLGLVNSGLTSVCCSALSSVLSTNQNLTHLYLRGNTLGDKGIKLLCEGLLHPDCKLQVLELDNCNLTSHCCWDLSTLLTSSQSLRKLSLGNNDLGDLGVMMFCEVLKQQSCLLQNLGLSEMYFNYETKSALETLQEEKPELTVVFEPSW

SEQ ID NO: 247 - protein, 612 aa, Homo sapiens
  SPLEEN ASSOCIATED TYROSINE KINASE (SYK), ISOFORM SYK(S) <Accession No.: NP_001167639.1>
MASSGMADSANHLPFFFGNITREEAEDYLVQGGMSDGLYLLRQSRNYLGGFALSVAHGRKAHHYTIERELNGTYAIAGGRTHASPADLCHYHSQESDGLVCLLKKPFNRPQGVQPKTGPFEDLKENLIREYVKQTWNLQGQALEQAIISQKPQLEKLIATTAHEKMPWFHGKISREESEQIVLIGSKTNGKFLIRARDNNGSYALCLLHEGKVLHYRIDKDKTGKLSIPEGKKFDTLWQLVEHYSYKADGLLRVLTVPCQKIGTQGNVNFGGRPQLPGSHPASSPAQGNRQESTVSFNPYEPELAPWAADKGPQREALPMDTEVYESPYADPEEIRPKEVYLDRKLLTLEDKELGSGNFGTVKKGYYQMKKVVKTVAVKILKNEANDPALKDELLAEANVMQQLDNPYIVRMIGICEAESWMLVMEMAELGPLNKYLQQNRHVKDKNIIELVHQVSMGMKYLEESNFVHRDLAARNVLLVTQHYAKISDFGLSKALRADENYYKAQTHGKWPVKWYAPECINYYKFSSKSDVWSFGVLMWEAFSYGQKPYRGMKGSEVTAMLEKGERMGCPAGCPREMYDLMNLCWTYDVENRPGFAAVELRLRNYYYDVVN

SEQ ID NO: 248 - protein, 635 aa, Homo sapiens
  SPLEEN ASSOCIATED TYROSINE KINASE (SYK), ISOFORM SYK(L) <Accession No.: NP_003168.2>
MASSGMADSANHLPFFFGNITREEAEDYLVQGGMSDGLYLLRQSRNYLGGFALSVAHGRKAHHYTIERELNGTYAIAGGRTHASPADLCHYHSQESDGLVCLLKKPFNRPQGVQPKTGPFEDLKENLIREYVKQTWNLQGQALEQAIISQKPQLEKLIATTAHEKMPWFHGKISREESEQIVLIGSKTNGKFLIRARDNNGSYALCLLHEGKVLHYRIDKDKTGKLSIPEGKKFDTLWQLVEHYSYKADGLLRVLTVPCQKIGTQGNVNFGGRPQLPGSHPATWSAGGIISRIKSYSFPKPGHRKSSPAQGNRQESTVSFNPYEPELAPWAADKGPQREALPMDTEVYESPYADPEEIRPKEVYLDRKLLTLEDKELGSGNFGTVKKGYYQMKKVVKTVAVKILKNEANDPALKDELLAEANVMQQLDNPYIVRMIGICEAESWMLVMEMAELGPLNKYLQQNRHVKDKNIIELVHQVSMGMKYLEESNFVHRDLAARNVLLVTQHYAKISDFGLSKALRADENYYKAQTHGKWPVKWYAPECINYYKFSSKSDVWSFGVLMWEAFSYGQKPYRGMKGSEVTAMLEKGERMGCPAGCPREMYDLMNLCWTYDVENRPGFAAVELRLRNYYYDVVN

SEQ ID NO: 249 - protein, 267 aa, Homo sapiens
  ADRENOCORTICOTROPIC HORMONE (ACTH), PREPROPROTEIN <Accession No.: NP_000930.1>
MPRSCCSRSGALLLALLLQASMEVRGWCLESSQCQDLTTESNLLECIRACKPDLSAETPMFPGNGDEQPLTENPRKYVMGHFRWDRFGRRNSSSSGSSGAGQKREDVSAGEDCGPLPEGGPEPRSDGAKPGPREGKRSYSMEHFRWGKPVGKKRRPVKVYPNGAEDESAEAFPLEFKRELTGQRLREGDGPDGPADDGAGAQADLEHSLLVAAEKKDEGPYRMEHFRWGSPPKDKRYGGFMTSEKSQTPLVTLFKNAIIKNAYKKGE

SEQ ID NO: 250 - protein, 404 aa, Homo sapiens
  CASPASE 1 (CASP1), ISOFORM ALPHA PRECURSOR <Accession No.: NP_001244047.1>
MADKVLKEKRKLFIRSMGEGTINGLLDELLQTRVLNKEEMEKVKRENATVMDKTRALIDSVIPKGAQACQICITYICEEDSYLAGTLGLSADQTSGNYLNMQDSQGVLSSFPAPQAVQDNPAMPTSSGSEGNVKLCSLEEAQRIWKQKSAEIYPIMDKSSRTRLALIICNEEFDSIPRRTGAEVDITGMTMLLQNLGYSVDVKKNLTASDMTTELEAFAHRPEHKTSDSTFLVFMSHGIREGICGKKHSEQVPDILQLNAIFNMLNTKNCPSLKDKPKVIIIQACRGDSPGVVWFKDSVGVSGNLSLPTTEEFEDDAIKKAHIEKDFIAFCSSTPDNVSWRHPTMGSVFIGRLIEHMQEYACSCDVEEIFRKVRFSFEQPDGRAQMPTTERVTLTRCFYLFPGH

SEQ ID NO: 251 - protein, 383 aa, Homo sapiens
  CASPASE 1 (CASP1), ISOFORM BETA PRECURSOR <Accession No.: NP_001244048.1>
MADKVLKEKRKLFIRSMGEGTINGLLDELLQTRVLNKEEMEKVKRENATVMDKTRALIDSVIPKGAQACQICITYICEEDSYLAGTLGLSAAPQAVQDNPAMPTSSGSEGNVKLCSLEEAQRIWKQKSAEIYPIMDKSSRTRLALIICNEEFDSIPRRTGAEVDITGMTMLLQNLGYSVDVKKNLTASDMTTELEAFAHRPEHKTSDSTFLVFMSHGIREGICGKKHSEQVPDILQLNAIFNMLNTKNCPSLKDKPKVIIIQACRGDSPGVVWFKDSVGVSGNLSLPTTEEFEDDAIKKAHIEKDFIAFCSSTPDNVSWRHPTMGSVFIGRLIEHMQEYACSCDVEEIFRKVRFSFEQPDGRAQMPTTERVTLTRCFYLFPGH

SEQ ID NO: 252 - protein, 128 aa, Homo sapiens; identical to SEQ ID NO: 189
  CD59  <Accession No.: CAG46523.1>

SEQ ID NO: 253 - protein, 114 aa, Homo sapiens
  NOTCH REGULATED ANKYRIN REPEAT PROTEIN (NRARP) <Accession No.: NP_001004354.1>
MSQAELSTCSAPQTQRIFQEAVRKGNTQELQSLLQNMTNCEFNVNSFGPEGQTALHQSVIDGNLELVKLLVKFGADIRLANRDGWSALHIAAFGGHQDIVLYLITKAKYAASGR

SEQ ID NO: 254 - protein, 491 aa, Homo sapiens
  ALPHA-2-ANTIPLASMIN (A2AP), ISOFORM A PRECURSOR <Accession No.: NP_000925.2>
MALLWGLLVLSWSCLQGPCSVFSPVSAMEPLGRQLTSGPNQEQVSPLTLLKLGNQEPGGQTALKSPPGVCSRDPTPEQTHRLARAMMAFTADLFSLVAQTSTCPNLILSPLSVALALSHLALGAQNHTLQRLQQVLHAGSGPCLPHLLSRLCQDLGPGAFRLAARMYLQKGFPIKEDFLEQSEQLFGAKPVSLTGKQEDDLANINQWVKEATEGKIQEFLSGLPEDTVLLLLNAIHFQGFWRNKFDPSLTQRDSFHLDEQFTVPVEMMQARTYPLRWFLLEQPEIQVAHFPFKNNMSFVVLVPTHFEWNVSQVLANLSWDTLHPPLVWERPTKVRLPKLYLKHQMDLVATLSQLGLQELFQAPDLRGISEQSLVVSGVQHQSTLELSEVGVEAAAATSIAMSRMSLSSFSVNRPFLFFIFEDTTGLPLFVGSVRNPNPSAPRELKEQQDSPGNKDFLQSLKGFPRGDKLFGPDLKLVPPMEEDYPQFGSPK

SEQ ID NO: 255 - protein, 427 aa, Homo sapiens
  ALPHA-2-ANTIPLASMIN (A2AP), ISOFORM B PRECURSOR <Accession No.: NP_001159393.1>
MALLWGLLVLSWSCLQGPCSVFSPVSAMEPLGRQLTSGPNQEQVSPLTLLKLGNQVQPGAQNHTLQRLQQVLHAGSGPCLPHLLSRLCQDLGPGAFRLAARMYLQKGFPIKEDFLEQSEQLFGAKPVSLTGKQEDDLANINQWVKEATEGKIQEFLSGLPEDTVLLLLNAIHFQGFWRNKFDPSLTQRDSFHLDEQFTVPVEMMQARTYPLRWFLLEQPEIQVAHFPFKNNMSFVVLVPTHFEWNVSQVLANLSWDTLHPPLVWERPTKVRLPKLYLKHQMDLVATLSQLGLQELFQAPDLRGISEQSLVVSGVQHQSTLELSEVGVEAAAATSIAMSRMSLSSFSVNRPFLFFIFEDTTGLPLFVGSVRNPNPSAPRELKEQQDSPGNKDFLQSLKGFPRGDKLFGPDLKLVPPMEEDYPQFGSPK

SEQ ID NO: 256 - protein, 810 aa, Homo sapiens [sequence omitted]

SEQ ID NO: 257 - protein, 217 aa, Homo sapiens
  GROWTH HORMONE <Accession No.: AAA98618.1>
MATGSRTSLLLAFGLLCLPWLQEGSAFPTIPLSRLFDNAMLRAHRLHQLAFDTYQEFEEAYIPKEQKYSFLQNPQTSLCFSESIPTPSNREETQQKSNLELLRISLLLIQSWLEPVQFLRSVFANSLVYGASDSNVYDLLKDLEEGIQTLMGRLEDGSPRTGQIFKQTYSKFDTNSHNDDALLKNYGLLYCFRKDMDKVETFLRIVQCRSVEGSCGF

SEQ ID NO: 258 - protein, 153 aa, Homo sapiens
  INSULIN LIKE GROWTH FACTOR 1 (IGF1) <Accession No.: CAG46659.1>
MGKISSLPTQLFKCCFCDFLKVKMHTMSSSHLFYLALCLLTFTSSATAGPETLCGAELVDALQFVCGDRGFYFNKPTGYGSSSRRAPQTGIVDECCFRSCDLRRLEMYCAPLKPAKSARSVRAQRHTDMPKTQKEVHLKNASRGSAGNKNYRM

SEQ ID NO: 259 - protein, 269 aa, Homo sapiens
  INTERLEUKIN 1 BETA (IL1B) <Accession No.: AAA74137.1>
MAEVPELASEMMAYYSGNEDDLFFEADGPKQMKCSFQDLDLCPLDGGIQLRISDHHYSKGFRQAASVVVAMDKLRKMLVPCPQTFQENDLSTFFPFIFEEEPIFFDTWDNEAYVHDAPVRSLNCTLRDSQQKSLVMSGPYELKALHLQGQDMEQQVVFSMSFVQGEESNDKIPVALGLKEKNLYLSCVLKDDKPTLQLESVDPKNYPKKKMEKRFVFNKIEINNKLEFESAQFPNWYISTSQAENMPVFLGGTKGGQDITDFTMQFVSS

SEQ ID NO: 260 - protein, 805 aa, Homo sapiens [sequence omitted]

SEQ ID NO: 261 - protein, 1163 aa, Homo sapiens [sequence omitted]

SEQ ID NO: 262 - protein, 798 aa, Homo sapiens
  INTEGRIN ALPHA SUBUNIT PRECURSOR  <Accession No.: P05556.2>
MNLQPIFWIGLISSVCCVFAQTDENRCLKANAKSCGECIQAGPNCGWCTNSTFLQEGMPTSARCDDLEALKKKGCPPDDIENPRGSKDIKKNKNVTNRSKGTAEKLKPEDITQIQPQQLVLRLRSGEPQTFTLKFKRAEDYPIDLYYLMDLSYSMKDDLENVKSLGTDLMNEMRRITSDFRIGFGSFVEKTVMPYISTTPAKLRNPCTSEQNCTSPFSYKNVLSLTNKGEVFNELVGKQRISGNLDSPEGGFDAIMQVAVCGSLIGWRNVTRLLVFSTDAGFHFAGDGKLGGIVLPNDGQCHLENNMYTMSHYYDYPSIAHLVQKLSENNIQTIFAVTEEFQPVYKELKNLIPKSAVGTLSANSSNVIQLIIDAYNSLSSEVILENGKLSEGVTISYKSYCKNGVNGTGENGRKCSNISIGDEVQFEISITSNKCPKKDSDSFKIRPLGFTEEVEVILQYICECECQSEGIPESPKCHEGNGTFECGACRCNEGRVGRHCECSTDEVNSEDMDAYCRKENSSEICSNNGECVCGQCVCRKRDNTNEIYSGKFCECDNFNCDRSNGLICGGNGVCKCRVCECNPNYTGSACDCSLDTSTCEASNGQICNGRGICECGVCKCTDPKFQGQTCEMCQTCLGVCAEHKECVQCRAFNKGEKKDTCTQECSYFNITKVESRDKLPQPVQPDPVSHCKEKDVDDCWFYFTYSVNGNNEVMVHVVENPECPTGPDIIPIVAGVVAGIVLIGLALLLIWKLLMIIHDRREFAKFEKEKMNAKWDTGENPIYKSAVTTVVNPKYEGK

SEQ ID NO: 263 - protein, 151 aa, Homo sapiens [sequence omitted]

SEQ ID NO: 264 - protein, 1366 aa, Homo sapiens
  INSULIN-LIKE GROWTH FACTOR 1 RECEPTOR (IGF1R) <Accession No.: AAI43722.1>
MKSGSGGGSPTSLWGLLFLSAALSLWPTSGEICGPGIDIRNDYQQLKRLENCTVIEGYLHILLISKAEDYRSYRFPKLTVITEYLLLFRVAGLESLGDLFPNLTVIRGWKLFYNYALVIFEMTNLKDIGLYNLRNITRGAIRIEKNADLCYLSTVDWSLILDAVSNNYIVGNKPPKECGDLCPGTMEEKPMCEKTTINNEYNYRCWTTNRCQKMCPSTCGKRACTENNECCHPECLGSCSAPDNDTACVACRHYYYAGVCVPACPPNTYRFEGWRCVDRDFCANILSAESSDSEGFVIHDGECMQECPSGFIRNGSQSMYCIPCEGPCPKVCEEEKKTKTIDSVTSAQMLQGCTIFKGNLLINIRRGNNIASELENFMGLIEVVTGYVKIRHSHALVSLSFLKNLRLILGEEQLEGNYSFYVLDNQNLQQLWDWDHRNLTIKAGKMYFAFNPKLCVSEIYRMEEVTGTKGRQSKGDINTRNNGERASCESDVLHFTSTTTSKNRIIITWHRYRPPDYRDLISFTVYYKEAPFKNVTEYDGQDACGSNSWNMVDVDLPPNKDVEPGILLHGLKPWTQYAVYVKAVTLTMVENDHIRGAKSEILYIRTNASVPSIPLDVLSASNSSSQLIVKWNPPSLPNGNLSYYIVRWQRQPQDGYLYRHNYCSKDKIPIRKYADGTIDIEEVTENPKTEVCGGEKGPCCACPKTEAEKQAEKEEAEYRKVFENFLHNSIFVPRPERKRRDVMQVANTTMSSRSRNTTAADTYNITDPEELETEYPFFESRVDNKERTVISNLRPFTLYRIDIHSCNHEAEKLGCSASNFVFARTMPAEGADDIPGPVTWEPRPENSIFLKWPEPENPNGLILMYEIKYGSQVEDQRECVSRQEYRKYGGAKLNRLNPGNYTARIQATSLSGNGSWTDPVFFYVQAKRYENFIHLIIALPVAVLLIVGGLVIMLYVFHRKRNNSRLGNGVLYASVNPEYFSAADVYVPDEWEVAREKITMSRELGQGSFGMVYEGVAKGVVKDEPETRVAIKTVNEAASMRERIEFLNEASVMKEFNCHHVVRLLGVVSQGQPTLVIMELMTRGDLKSYLRSLRPEMENNPVLAPPSLSKMIQMAGEIADGMAYLNANKFVHRDLAARNCMVAEDFTVKIGDFGMTRDIYETDYYRKGGKGLLPVRWMSPESLKDGVFTTYSDVWSFGVVLWEIATLAEQPYQGLSNEQVLRFVMEGGLLDKPDNCPDMLFELMRMCWQYNPKMRPSFLEIISSIKEEMEPGFREVSFYYSEENKLPEPEELDLEPENMESVPLDPSASSSSLPLPDRHSGHKAENGPGPGVLVLRASFDERQPYAHMNGGRKNERALPLPQSSTC

SEQ ID NO: 265 - protein, 2491 aa, Homo sapiens
  INSULIN-LIKE GROWTH FACTOR 2 RECEPTOR (IGF2R) <Accession No.: AAK56918.1>
MGAAAGRSPHLGPAPARRPQRSLLLLQLLLLVAAPGSTQAQAAPFPELCSYTWEAVDTKNNVLYKINICGSVDIVQCGPSSAVCMHDLKTRTYHSVGDSVLRSATRSLLEFNTTVSCDQQGTNHRVQSSIAFLCGKTLGTPEFVTATECVHYFEWRTTAACKKDIFKANKEVPCYVFDEELRKHDLNPLIKLSGAYLVDDSDPDTSLFINVCRDIDTLRDPGSQLRACPPGTAACLVRGHQAFDVGQPRDGLKLVRKDRLVLSYVREEAGKLDFCDGHSPAVTITFVCPSERREGTIPKLTAKSNCRYEIEWITEYACHRDYLESKTCSLSGEQQDVSIDLTPLAQSGGSSYISDGKEYLFYLNVCGETEIQFCNKKQAAVCQVKKSDTSQVKAAGRYHNQTLRYSDGDLTLIYFGGDECSSGFQRMSVINFECNKTAGNDGKGTPVFTGEVDCTYFFTWDTEYACVKEKEDLLCGATDGKKRYDLSALVRHAEPEQNWEAVDGSQTETEKKHFFINICHRVLQEGKARGCPEDAAVCAVDKNGSKNLGKFISSPMKEKGNIQLSYSDGDDCGHGKKIKTNITLVCKPGDLESAPVLRTSGEGGCFYEFEWHTAAACVLSKTEGENCTVFDSQAGFSFDLSPLTKKNGAYKVETKKYDFYINVCGPVSVSPCQPDSGACQVAKSDEKTWNLGLSNAKLSYYDGMIQLNYRGGTPYNNERHTPRATLITFLCDRDAGVGFPEYQEEDNSTYNFRWYTSYACPEEPLECVVTDPSTLEQYDLSSLAKSEGGLGGNWYAMDNSGEHVTWRKYYINVCRPLNPVPGCNRYASACQMKYEKDQGSFTEVVSISNLGMAKTGPVVEDSGSLLLEYVNGSACTTSDGRQTTYTTRIHLVCSRGRLNSHPIFSLNWECVVSFLWNTEAACPIQTTTDTDQACSIRDPNSGFVFNLNPLNSSQGYNVSGIGKIFMFNVCGTMPVCGTILGKPASGCEAETQTEELKNWKPARPVGIEKSLQLSTEGFITLTYKGPLSAKGTADAFIVRFVCNDDVYSGPLKFLHQDIDSGQGIRNTYFEFETALACVPSPVDCQVTDLAGNEYDLTGLSTVRKPWTAVDTSVDGRKRTFYLSVCNPLPYIPGCQGSAVGSCLVSEGNSWNLGVVQMSPQAAANGSLSIMYVNGDKCGNQRFSTRITFECAQISGSPAFQLQDGCEYVFIWRTVEACPVVRVEGDNCEVKDPRHGNLYDLKPLGLNDTIVSAGEYTYYFRVCGKLSSDVCPTSDKSKVVSSCQEKREPQGFHKVAGLLTQKLTYENGLLKMNFTGGDTCHKVYQRSTAIFFYCDRGTQRPVFLKETSDCSYLFEWRTQYACPPFDLTECSFKDGAGNSFDLSSLSRYSDNWEAITGTGDPEHYLINVCKSLAPQAGTEPCPPEAAACLLGGSKPVNLGRVRDGPQWRDGIIVLKYVDGDLCPDGIRKKSTTIRFTCSESQVNSRPMFISAVEDCEYTFAWPTATACPMKSNEHDDCQVTNPSTGHLFDLSSLSGRAGFTAAYSEKGLVYMSICGENENCPPGVGACFGQTRISVGKANKRLRYVDQVLQLVYKDGSPCPSKSGLSYKSVISFVCRPEARPTNRPMLISLDKQTCTLFFSWHTPLACEQATECSVRNGSSIVDLSPLIHRTGGYEAYDESEDDASDTNPDFYINICQPLNPMHGVPCPAGAAVCKVPIDGPPIDIGRVAGPPILNPIANEIYLNFESSTPCLADKHFNYTSLIAFHCKRGVSMGTPKLLRTSECDFVFEWETPVVCPDEVRMDGCTLTDEQLLYSFNLSSLSTSTFKVTRDSRTYSVGVCTFAVGPEQGGCKDGGVCLLSGTKGASFGRLQSMKLDYRHQDEAVVLSYVNGDRCPPETDDGVPCVFPFIFNGKSYEECIIESRAKLWCSTTADYDRDHEWGFCRHSNSYRTSSIIFKCDEDEDIGRPQVFSEVRGCDVTFEWKTKVVCPPKKLECKFVQKHKTYDLRLLSSLTGSWSLVHNGVSYYINLCQKIYKGPLGCSERASICRRTTTGDVQVLGLVHTQKLGVIGDKVVVTYSKGYPCGGNKTASSVIELTCTKTVGRPAFKRFDIDSCTYYFSWDSRAACAVKPQEVQMVNGTITNPINGKSFSLGDIYFKLFRASGDMRTNGDNYLYEIQLSSITSSRNPACSGANICQVKPNDQHFSRKVGTSDKTKYYLQDGDLDVVFASSSKCGKDKTKSVSSTIFFHCDPLVEDGIPEFSHETADCQYLFSWYTSAVCPLGVGFDSENPGDDGQMHKGLSERSQAVGAVLSLLLVALTCCLLALLLYKKERRETVISKLTTCCRRSSNVSYKYSKVNKEEETDENETEWLMEEIQLPPPRQGKEGQENGHITTKSVKALSSLHGDDQDSEDEVLTIPEVKVHSGRGAGAESSHPVRNAQSNALQEREDDRVGLVRGEKARKGKSSSAQQKTVSSTKLVSFHDDSDEDLLHI

SEQ ID NO: 266 - protein, 232 aa, Homo sapiens; identical to SEQ ID NO: 206
  RTP801  <Accession No.: AAL38424.1>

SEQ ID NO: 267 - protein, 457 aa, Homo sapiens
  METALLOPROTEINASE 2 (MMP2)  <Accession No.: BAA12023>
MILLTFSTGRRLDFVHHSGVFFLQTLLWILCATVCGTEQYFNVEVWLQKYGYLPPTDPRMSVLRSAETMQSALAAMQQFYGINMTGKVDRNTIDWMKKPRCGVPDQTRGSSKFHIRRKRYALTGQKWQHKHITYSIKNVTPKVGDPETRKAIRRAFDVWQNVTPLTFEEVPYSELENGKRDVDITIIFASGFHGDSSPFDGEGGFLAHAYFPGPGIGGDTHFDSDEPWTLGNPNHDGNDLFLVAVHELGHALGLEHSNDPTAIMAPFYQYMETDNFKLPNDDLQGIQKIYGPPDKIPPPTRPLPTVPPHRSIPPADPRKNDRPKPPRPPTGRPSYPGAKPNICDGNFNTLAILRREMFVFKDQWFWRVRNNRVMDGYPMQITYFWRGLPPSIDAVYENSDGNFVFFKVKGDTLSVIQDGWLYKYHWKWILEQRQSVPVLSRQTEKHKTYEELSSITY

SEQ ID NO: 268 - protein, 404 aa, Homo sapiens
  G-PROTEIN COUPLED RECEPTOR 143 (GPR143) <Accession No.: NP_000264>
MASPRLGTFCCPTRDAATQLVLSFQPRAFHALCLGSGGLRLALGLLQLLPGRRPAGPGSPATSPPASVRILRAAAACDLLGCLGMVIRSTVWLGFPNFVDSVSDMNHTEIWPAAFCVGSAMWIQLLYSACFWWLFCYAVDAYLVIRRSAGLSTILLYHIMAWGLATLLCVEGAAMLYYPSVSRCERGLDHAIPHYVTMYLPLLLVLVANPILFQKTVTAVASLLKGRQGIYTENERRMGAVIKIRFFKIMLVLIICWLSNIINESLLFYLEMQTDINGGSLKPVRTAAKTTWFIMGILNPAQGFLLSLAFYGWTGCSLGFQSPRKEIQWESLTTSAAEGAHPSPLMPHENPASGKVSQVGGQTSDEALSMLSEGSDASTIEIHTASESCNKNEGDPALPTHGDL

SEQ ID NO: 269 - protein, 424 aa, Homo sapiens
  G-PROTEIN COUPLED RECEPTOR 143 (GPR143) <Accession No.: EAW98773.1>
MTQAGRRGPGTPEPRPRTQPMASPRLGTFCCPTRDAATQLVLSFQPRAFHALCLGSGGLRLALGLLQLLPGRRPAGPGSPATSPPASVRILRAAAACDLLGCLGMVIRSTVWLGFPNFVDSVSDMNHTEIWPAAFCVGSAMWIQLLYSACFWWLFCYAVDAYLVIRRSAGLSTILLYHIMAWGLATLLCVEGAAMLYYPSVSRCERGLDHAIPHYVTMYLPLLLVLVANPILFQKTVTAVASLLKGRQGIYTENERRMGAVIKIRFFKIMLVLIICWLSNIINESLLFYLEMQTDINGGSLKPVRTAAKTTWFIMGILNPAQGFLLSLAFYGWTGCSLGFQSPRKEIQWESLTTSAAEGAHPSPLMPHENPASGKVSQVGGQTSDEALSMLSEGSDASTIEIHTASESCNKNEGDPALPTHGDL

SEQ ID NO: 270 - protein, 529 aa, Homo sapiens [sequence omitted]

SEQ ID NO: 271 - protein, 312 aa, Homo sapiens
  CASPASE 2 (CASP2) <Accession No.: CAG46548.1>
MHPHHQETLKKNRVVLAKQLLLSELLEHLLEKDIITLEMRELIQAKVGSFSQNVELLNLLPKRGPQAFDAFCEALRETKQGHLEDMLLTTLSGLQHVLPPLSCDYDLSLPFPVCESCPLYKKLRLSTDTVEHSLDNKDGPVCLQVKPCTPEFYQTHFQLAYRLQSRPRGLALVLSNVHFTGEKELEFRSGGDVDHSTLVTLFKLLGYDVHVLCDQTAQEMQEKLQNFAQLPAHRVTDSCIVALLSHGVEGAIYGVDGKLLQLQEVFQLFDNANCPSLQNKPKMFFIQACRGGAIGSLGHLLLFTAATASLAL

SEQ ID NO: 272 - protein, 614 aa, Homo sapiens
  LEUCINE RICH REPEAT AND IG DOMAIN CONTAINING PROTEIN 1 (LINGO1) <Accession No.: AAH68558.1>
MLAGGVRSMPSPLLACWQPILLLVLGSVLSGSATGCPPRYECSAQDRAVLCHRKRFVAVPEGIPTETRLLDLGKNRIKTLNQDEFASFPHLEELELNENIVSAVEPGAFNNLFNLRTLGLRSNRLKLIPLGVFTGLSNLTKLDISENKIVILLDYMFQDLYNLRSLEVGDNDLVYISHRAFSGLNSLEQLTLEKCNLTSIPTEALSHLHGLIVLRLRHLNINAIRDYSFKRLYRLKVLEISHWPYLDTMTPNCLYGLNLTSLSITHCNLTAVPYLAVRHLVYLRFLNLSYNRISTIEGSMLHELLRLQEIQLVGGQLAVVEPYAFRGLNYLRVLNVSGNQLTTLEESVFHSVGNLETLILDSNPLACDCRLLWVFRRRWRLNFNRQQPTCATPEFVQGKEFKDFPDVLLPNYFTCRRARIRDRKAQQVFVDEGHTVQFVCRADGDPPPAILWLSPRKHLVSAKSNGRLTVFPDGTLEVRYAQVQDNGTYLCIAANAGGNDSMPAHLHVRSYSPDWPHQPNKTFAFISNQPGEGEANSTRATVPFPFDIKTLIIATTMGFISFLGVVLFCLVLLFLWSRGKGNTKHNIEIEYVPRKSDAGISSADAPRKFNMKMI

SEQ ID NO: 273 - protein, 306 aa, Homo sapiens
  PALMITOYL-PROTEIN THIOESTERASE 1 (PPT1) <Accession No.: AAH08426.1>
MASPGCLWLLAVALLPWTCASRALQHLDPPAPLPLVIWHGMGDSCCNPLSMGAIKKMVEKKIPGIYVLSLEIGKTLMEDVENSFFLNVNSQVTTVCQALAKDPKLQQGYNAMGFSQGGQFLRAVAQRCPSPPMINLISVGGQHQGVFGLPRCPGESSHICDFIRKTLNAGAYSKVVQERLVQAEYWHDPIKEDVYRNHSIFLADINQERGINESYKKNLMALKKFVMVKFLNDSIVDPVDSEWFGFYRSGQAKETIPLQETSLYTQDRLGLKEMDNAGQLVFLATEGDHLQLSEEWFYAHIIPFLG

SEQ ID NO: 274 - protein, 563 aa, Homo sapiens
  TRIPEPTIDYL-PEPTIDASE 1 (TPP1) <Accession No.: NP_000382.3>
MGLQACLLGLFALILSGKCSYSPEPDQRRTLPPGWVSLGRADPEEELSLTFALRQQNVERLSELVQAVSDPSSPQYGKYLTLENVADLVRPSPLTLHTVQKWLLAAGAQKCHSVITQDFLTCWLSIRQAELLLPGAEFHHYVGGPTETHVVRSPHPYQLPQALAPHVDFVGGLHRFPPTSSLRQRPEPQVTGTVGLHLGVTPSVIRKRYNLTSQDVGSGTSNNSQACAQFLEQYFHDSDLAQFMRLFGGNFAHQASVARVVGQQGRGRAGIEASLDVQYLMSAGANISTWVYSSPGRHEGQEPFLQWLMLLSNESALPHVHTVSYGDDEDSLSSAYIQRVNTELMKAAARGLTLLFASGDSGAGCWSVSGRHQFRPTFPASSPYVTTVGGTSFQEPFLITNEIVDYISGGGFSNVFPRPSYQEEAVTKFLSSSPHLPPSSYFNASGRAYPDVAALSDGYWVVSNRVPIPWVSGTSASTPVFGGILSLINEHRILSGRPPLGFLNPRLYQQHGAGLFDVTRGCHESCLDEEVEGQGFCSGPGWDPVTGWGTPNFPALLKTLLNP

SEQ ID NO: 275 - protein, 360 aa, Homo sapiens
  BATTENIN (CLN3) <Accession No.: AAI11069.1>
MLSAAHDILSHKRTSGNQSHAVLLADILPTLVIKLLAPLGLHLLPYSPRVLVSGICAAGSFVLVAFSHSVGTSLCGVVFASISSGLGEVTFLSLTAFYPRAVISWWSSGTGGAGLLGALSYLGLTQAGLSPQQTLLSMLGIPALLLASYFLLLTSPEAQDPGGEEEAESAARQPLIRTEAPESKPGSSSSLSLRERWTVFKGLLWYIVPLVVVYFAEYFINQGLFELLFFWNTSLSHAQQYRWYQMLYQAGVFASRSSLRCCRIRFTWALALLQCLNLVFLLADVWFGFLPSIYLVFLIILYEGLLGGAAYVNTFHNIALETSDEHREFAMAATCISDTLGISLSGLLALPLHDFLCQLS

SEQ ID NO: 276 - protein, 311 aa, Homo sapiens
  CLN6 TRANSMEMBRANE ER PROTEIN (CLN6) <Accession No.: NP_060352.1>
MEATRRRQHLGATGGPGAQLGASFLQARHGSVSADEAARTAPFHLDLWFYFTLQNWVLDFGRPIAMLVFPLEWFPLNKPSVGDYFHMAYNVITPFLLLKLIERSPRTLPRSITYVSIIIFIMGASIHLVGDSVNHRLLFSGYQHHLSVRENPIIKNLKPETLIDSFELLYYYDEYLGHCMWYIPFFLILFMYFSGCFTASKAESLIPGPALLLVAPSGLYYWYLVTEGQIFILFIFTFFAMLALVLHQKRKRLFLDSNGLFLFSSFALTLLLVALWVAWLWNDPVLRKKYPGVIYVPEPWAFYTLHVSSRH

SEQ ID NO: 277 - protein, 518 aa, Homo sapiens
  MAJOR FACILITATOR SUPERFAMILY DOMAIN CONTAINING 8 (MFSD8) <Accession No.: AAH29503.1>
MAGLRNESEQEPLLGDTPGSREWDILETEEHYKSRWRSIRILYLTMFLSSVGFSVVMMSIWPYLQKIDPTADTSFLGWVIASYSLGQMVASPIFGLWSNYRPRKEPLIVSILISVAANCLYAYLHIPASHNKYYMLVARGLLGIGAGNVAVVRSYTAGATSLQERTSSMANISMCQALGFILGPVFQTCFTFLGEKGVTWDVIKLQINMYTTPVLLSAFLGILNIILILAILREHRVDDSGRQCKSINFEEASTDEAQVPQGNIDQVAVVAINVLFFVTLFIFALFETIITPLTMDMYAWTQEQAVLYNGIILAALGVEAVVIFLGVKLLSKKIGERAILLGGLIVVWVGFFILLPWGNQFPKIQWEDLHNNSIPNTTFGEIIIGLWKSPMEDDNERPTGCSIEQAWCLYTPVIHLAQFLTSAVLIGLGYPVCNLMSYTLYSKILGPKPQGVYMGWLTASGSGARILGPMFISQVYAHWGPRWAFSLVCGIIVLTITLLGVVYKRLIALSVRYGRIQE

SEQ ID NO: 278 - protein, 2215 aa, Homo sapiens
  MYOSIN VIIA (MYO7A) <Accession No.: AAB03679.1>
MVILQQGDHVWMDLRLGQEFDVPIGAVVKLCDSGQVQVVDDEDNEHWISPQNATHIKPMHPTSVHGVEDMIRLGDLNEAGILRNLLIRYRDHLIYTYTGSILVAVNPYQLLSIYSPEHIRQYTNKKIGEMPPHIFAIADNCYFNMKRNSRDQCCIISGESGAGKTESTKLILQFLAAISGQHSWIEQQVLEATPILEAFGNAKTIRNDNSSRFGKYIDIHFNKRGAIEGAKIEQYLLEKSRVCRQALDERNYHVFYCMLEGMSEDQKKKLGLGQASDYNYLAMGNCITCEGRVDSQEYANIRSAMKVLMFTDTENWEISKLLAAILHLGNLQYEARTFENLDACEVLFSPSLATAASLLEVNPPDLMSCLTSRTLITRGETVSTPLSREQALDVRDAFVKGIYGRLFVWIVDKINAAIYKPPSQDVKNSRRSIGLLDIFGFENFAVNSFEQLCINFANEHLQQFFVRHVFKLEQEEYDLESIDWLHIEFTDNQDALDMIANKPMNIISLIDEESKFPKGTDTTMLHKLNSQHKLNANYIPPKNNHETQFGINHFAGIVYYETQGFLEKNRDTLHGDIIQLVHSSRNKFIKQIFQADVAMGAETRKRSPTLSSQFKRSLELLMRTLGACQPFFVRCIKPNEFKKPMLFDRHLCVRQLRYSGMMETIRIRRAGYPIRYSFVEFVERYRVLLPGVKPAYKQGDLRGTCQRMAEAVLGTHDDWQIGKTKIFLKDHHDMLLEVERDKAITDRVILLQKVIRGFKDRSNFLKLKNAATLIQRHWRGHNCRKNYGLMRLGFLRLQALHRSRKLHQQYRLARQRIIQFQARCRAYLVRKAFRHRLWAVLTVQAYARGMIARRLHQRLRAEYLWRLEAEKMRLAEEEKLRKEMSAKKAKEEAERKHQERLAQLAREDAERELKEKEAARRKKELLEQMERARHEPVNHSDMVDKMFGFLGTSGGLPGQEGQAPSGFEDLERGRREMVEEDLDAALPLPDEDEEDLSEYKFAKFAATYFQGTTTHSYTRRPLKQPLLYHDDEGDQLAALAVWITILRFMGDLPEPKYHTAMSDGSEKIPVMTKIYETLGKKTYKRELQALQGEGEAQLPEGQKKSSVRHKLVHLTLKKKSKLTEEVTKRLHDGESTVQGNSMLEDRPTSNLEKLHFIIGNGILRPALRDEIYCQISKQLTHNPSKSSYARGWILVSLCVGCFAPSEKFVKYLRNFIHGGPPGYAPYCEERLRRTFVNGTRTQPPSWLELQATKSKKPIMLPVTFMDGTTKTLLTDSATTAKELCNALADKISLKDRFGFSLYIALFDKVSSLGSGSDHVMDAISQCEQYAKEQGAQERNAPWRLFFRKEVFTPWHSPSEDNVATNLIYQQVVRGVKFGEYRCEKEDDLAELASQQYFVDYGSEMILERLLNLVPTYIPDREITPLKTLEKWAQLAIAAHKKGIYAQRRTDAQKVKEDVVSYARFKWPLLFSRFYEAYKFSGPSLPKNDVIVAVNWTGVYFVDEQEQVLLELSFPEIMAVSSSRECRVWLSLGCSDLGCAAPHSGWAGLTPAGPCSPCWSCRGAKTTAPSFTLATIKGDEYTFTSSNAEDIRDLVVTFLEGLRKRSKYVVALQDNPNPAGEESGFLSFAKGDLIILDHDTGEQVMNSGWANGINERTKQRGDFPTDCVYVMPTVTMPPREIVALVTMTPDQRQDVVRLLQLRTAEPEVRAKPYTLEEFSYDYFRPPPKHTLSRVMVSKARGKDRLWSHTREPLKQALLKKLLGSEELSQEACLAFIAVLKYMGDYPSKRTRSVNELTDQIFEGPLKAEPLKDEAYVQILKQLTDNHIRYSEERGWELLWLCTGLFPPSNILLPHVQRFLQSRKHCPLAIDCLQRLQKALRNGSRKYPPHLVEVEAIQHKTTQIFHKVYFPDDTDEAFEVESSTKAKDFCQNIATRLLLKSSEGFSLFVKIADKVISVPENDFFFDFVRHLTDWIKKARPIKDGIVPSLTYQVFFMKKLWTTTVPGKDPMADSIFHYYQELPKYLRGYHKCTREEVLQLGALIYRVKFEEDKSYFPSIPKLLRELVPQDLIRQVSPDDWKRSIVAYFNKHAGKSKEEAKLAFLKLIFKWPTFGSAFFEVKQTTEPNFPEILLIAINKYGVSLIDPKTKDILTTHPFTKISNWSSGNTYFHITIGNLVRGSKLLCETSLGYKMDDLLTSYISQMLTAMSKQRGSRSGK

SEQ ID NO: 279 - protein, 1178 aa, Homo sapiens
  MYOSIN VIIA (MYO7A), ISOFORM CRA_A  <Accession No.: EAW75018.1>
MVILQQGDHVWMDLRLGQEFDVPIGAVVKLCDSGQVQVVDDEDNEHWISPQNATHIKPMHPTSVHGVEDMIRLGDLNEAGILRNLLIRYRDHLIYTYTGSILVAVNPYQLLSIYSPEHIRQYTNKKIGEMPPHIFAIADNCYFNMKRNSRDQCCIISGESGAGKTESTKLILQFLAAISGQHSWIEQQVLEATPILEAFGNAKTIRNDNSSRFGKYIDIHFNKRGAIEGAKIEQYLLEKSRVCRQALDERNYHVFYCMLEGMSEDQKKKLGLGQASDYNYLAMGNCITCEGRVDSQEYANIRSAMKVLMFTDTENWEISKLLAAILHLGNLQYEARTFENLDACEVLFSPSLATAASLLEVNPPDLMSCLTSRTLITRGETVSTPLSREQALDVRDAFVKGIYGRLFVWIVDKINAAIYKPPSQDVKNSRRSIGLLDIFGFENFAVNSFEQLCINFANEHLQQFFVRHVFKLEQEEYDLESIDWLHIEFTDNQDALDMIANKPMNIISLIDEESKFPKGTDTTMLHKLNSQHKLNANYIPPKNNHETQFGINHFAGIVYYETQGFLEKNRDTLHGDIIQLVHSSRNKFIKQIFQADVAMGAETRKRSPTLSSQFKRSLELLMRTLGACQPFFVRCIKPNEFKKPMLFDRHLCVRQLRYSGMMETIRIRRAGYPIRYSFVEFVERYRVLLPGVKPAYKQGDLRGTCQRMAEAVLGTHDDWQIGKTKIFLKDHHDMLLEVERDKAITDRVILLQKVIRGFKDRSNFLKLKNAATLIQRHWRGHNCRKNYGLMRLGFLRLQALHRSRKLHQQYRLARQRIIQFQARCRAYLVRKAFRHRLWAVLTVQAYARGMIARRLHQRLRAEYLWRLEAEKMRLAEEEKLRKEMSAKKAKEEAERKHQERLAQLAREDAERELKEKEAARRKKELLEQMERARHEPVNHSDMVDKMFGFLGTSGGLPGQEGQAPSGFEDLERGRREMVEEDLDAALPLPDEDEEDLSEYKFAKFAATYFQGTTTHSYTRRPLKQPLLYHDDEGDQLAALAVWITILRFMGDLPEPKYHTAMSDGSEKIPVMTKIYETLGKKTYKRELQALQGEGEAQLPEGQKKSSVRHKLVHLTLKKKSKLTEEVTKRLHDGESTVQGNSMLEDRPTSNLEKLHFIIGNGILRPALRSVPGGGDTRA

SEQ ID NO: 280 - protein, 2215 aa, Homo sapiens; identical to SEQ ID NO: 278
  MYOSIN VIIA (MYO7A), ISOFORM CRA_B <Accession No.: EAW75019.1>

SEQ ID NO: 281 - protein, 2217 aa, Homo sapiens [sequence omitted]

SEQ ID NO: 282 - protein, 791 aa, Homo sapiens
  MYOSIN VIIA (MYO7A), ISOFORM CRA_D <Accession No.: EAW75021.1>
MVILQQGDHVWMDLRLGQEFDVPIGAVVKLCDSGQVQVVDDEDNEHWISPQNATHIKPMHPTSVHGVEDMIRLGDLNEAGILRNLLIRYRDHLIYTYTGSILVAVNPYQLLSIYSPEHIRQYTNKKIGEMPPHIFAIADNCYFNMKRNSRDQCCIISGESGAGKTESTKLILQFLAAISGQHSWIEQQVLEATPILEAFGNAKTIRNDNSSRFGKYIDIHFNKRGAIEGAKIEQYLLEKSRVCRQALDERNYHVFYCMLEGMSEDQKKKLGLGQASDYNYLAMGNCITCEGRVDSQEYANIRSAMKVLMFTDTENWEISKLLAAILHLGNLQYEARTFENLDACEVLFSPSLATAASLLEVNPPDLMSCLTSRTLITRGETVSTPLSREQALDVRDAFVKGIYGRLFVWIVDKINAAIYKPPSQDVKNSRRSIGLLDIFGFENFAVNSFEQLCINFANEHLQQFFVRHVFKLEQEEYDLESIDWLHIEFTDNQDALDMIANKPMNIISLIDEESKFPKGTDTTMLHKLNSQHKLNANYIPPKNNHETQFGINHFAGIVYYETQGFLEKNRDTLHGDIIQLVHSSRNKFIKQIFQADVAMGAETRKRSPTLSSQFKRSLELLMRTLGACQPFFVRCIKPNEFKKPMLFDRHLCVRQLRYSGMMETIRIRRAGYPIRYSFVEFVERYRVLLPGVKPAYKQGDLRGTCQRMAEAVLGTHDDWQIGKTKIFLKDHHDMLLEVERDKAITDRVILLQKVIRGFKDRCVFPPAPPLLSPHTGVRVVFGSPLLCPHEH

SEQ ID NO: 283 - protein, 2177 aa, Homo sapiens [sequence omitted]

SEQ ID NO: 284 - protein, 1958 aa, Homo sapiens [sequence omitted]

SEQ ID NO: 285 - protein, 3354 aa, Homo sapiens
  CADHERIN RELATED 23 (CDH23) <Accession No.: AAG27034.2>
MGRHVATSCHVAWLLVLISGCWGQVNRLPFFTNHFFDTYLLISEDTPVGSSVTQLLAQDMDNDPLVFGVSGEEASRFFAVEPDTGVVWLRQPLDRETKSEFTVEFSVSDHQGVITRKVNIQVGDVNDNAPTFHNQPYSVRIPENTPVGTPIFIVNATDPDLGAGGSVLYSFQPPSQFFAIDSARGIVTVIRELDYETTQAYQLTVNATDQDKTRPLSTLANLAIIITDVQDMDPIFINLPYSTNIYEHSPPGTTVRIITAIDQDKGRPRGIGYTIVSGNTNSIFALDYISGVLTLNGLLDRENPLYSHGFILTVKGTELNDDRTPSDATVTTTFNILVIDINDNAPEFNSSEYSVAITELAQVGFALPLFIQVVDKDENLGLNSMFEVYLVGNNSHHFIISPTSVQGKADIRIRVAIPLDYETVDRYDFDLFANESVPDHVGYAKVKITLINENDNRPIFSQPLYNISLYENVTVGTSVLTVLATDNDAGTFGEVSYFFSDDPDRFSLDKDTGLIMLIARLDYELIQRFTLTIIARDGGGEETTGRVRINVLDVNDNVPTFQKDAYVGALRENEPSVTQLVRLRATDEDSPPNNQITYSIVSASAFGSYFDISLYEGYGVISVSRPLDYEQISNGLIYLTVMAMDAGNPPLNSTVPVTIEVFDENDNPPTFSKPAYFVSVVENIMAGATVLFLNATDLDRSREYGQESIIYSLEGSTQFRINARSGEITTTSLLDRETKSEYILIVRAVDGGVGHNQKTGIATVNITLLDINDNHPTWKDAPYYINLVEMTPPDSDVTTVVAVDPDLGENGTLVYSIQPPNKFYSLNSTTGKIRTTHAMLDRENPDPHEAELMRKIVVSVTDCGRPPLKATSSATVFVNLLDLNDNDPTFQNLPFVAEVLEGIPAGVSIYQVVAIDLDEGLNGLVSYRMPVGMPRMDFLINSSSGVVVTTTELDRERIAEYQLRVVASDAGTPTKSSTSTLTIHVLDVNDETPTFFPAVYNVSVSEDVPREFRVVWLNCTDNDVGLNAELSYFITGGNVDGKFSVGYRDAVVRTVVGLDRETTAAYMLILEAIDNGPVGKRHTGTATVFVTVLDVNDNRPIFLQSSYEASVPEDIPEGHSILQLKATDADEGEFGRVWYRILHGNHGNNFRIHVSNGLLMRGPRPLDRERNSSHVLIVEAYNHDLGPMRSSVRVIVYVEDINDEAPVFTQQQYSRLGLRETAGIGTSVIVVQATDRDSGDGGLVNYRILSGAEGKFEIDESTGLIITVNYLDYETKTSYMMNVSATDQAPPFNQGFCSVYITLLNELDEAVQFSNASYEAAILENLALGTEIVRVQAYSIDNLNQITYRFDAYTSTQAKALFKIDAITGVITVQGLVDREKGDFYTLTVVADDGGPKVDSTVKVYITVLDENDNSPRFDFTSDSAVSIPEDCPVGQRVATVKAWDPDAGSNGQVVFSLASGNIAGAFEIVTTNDSIGEVFVARPLDREELDHYILQVVASDRGTPPRKKDHILQVTILDINDNPPVIESPFGYNVSVNENVGGGTAVVQVRATDRDIGINSVLSYYITEGNKDMTFRMDRISGEIATRPAPPDRERQSFYHLVATVEDEGTPTLSATTHVYVTIVDENDNAPMFQQPHYEVLLDEGPDTLNTSLITIQALDLDEGPNGTVTYAIVAGNIVNTFRIDRHMGVITAAKELDYEISHGRYTLIVTATDQCPILSHRLTSTTTVLVNVNDINDNVPTFPRDYEGPFEVTEGQPGPRVWTFLAHDRDSGPNGQVEYSIMDGDPLGEFVISPVEGVLRVRKDVELDRETIAFYNLTICARDRGMPPLSSTMLVGIRVLDINDNDPVLLNLPMNITISENSPVSSFVAHVLASDADSGCNARLTFNITAGNRERAFFINATTGIVTVNRPLDRERIPEYKLTISVKDNPENPRIARRDYDLLLIFLSDENDNHPLFTKSTYQAEVMENSPAGTPLTVLNGPILALDADQDIYAVVTYQLLGAQSGLFDINSSTGVVTVRSGVIIDREAFSPPILELLLLAEDIGLLNSTAHLLITILDDNDNRPTFSPATLTVHLLENCPPGFSVLQVTATDEDSGLNGELVYRIEAGAQDRFLIHLVTGVIRVGNATIDREEQESYRLTVVATDRGTVPLSGTAIVTILIDDINDSRPEFLNPIQTVSVLESAEPGTVIANITAIDHDLNPKLEYHIVGIVAKDDTDRLVPNQEDAFAVNINTGSVMVKSPMNRELVATYEVTLSVIDNASDLPERSVSVPNAKLTVNVLDVNDNTPQFKPFGITYYMERILEGATPGTTLIAVAAVDPDKGLNGLVTYTLLDLVPPGYVQLEDSSAGKVIANRTVDYEEVHWLNFTVRASDNGSPPRAAEIPVYLEIVDINDNNPIFDQPSYQEAVFEDVPVGTIILTVTATDADSGNFALIEYSLGDGESKFAINPTTGDIYVLSSLDREKKDHYILTALAKDNPGDVASNRRENSVQVVIQVLDVNDCRPQFSKPQFSTSVYENEPAGTSVITMMATDQDEGPNGELTYSLEGPGVEAFHVDMDSGLVTTQRPLQSYEKFSLTVVATDGGEPPLWGTTMLLVEVIDVNDNRPVFVRPPNGTILHIREEIPLRSNVYEVYATDKDEGLNGAVRYSFLKTAGNRDWEFFIIDPISGLIQTAQRLDRESQAVYSLILVASDLGQPVPYETMQPLQVALEDIDDNEPLFVRPPKGSPQYQLLTVPEHSPRGTLVGNVTGAVDADEGPNAIVYYFIAAGNEEKNFHLQPDGCLLVLRDLDREREAIFSFIVKASSNRSWTPPRGPSPTLDLVADLTLQEVRVVLEDINDQPPRFTKAEYTAGVATDAKVGSELIQVLALDADIGNNSLVFYSILAIHYFRALANDSEDVGQVFTMGSMDGILRTFDLFMAYSPGYFVVDIVARDLAGHNDTAIIGIYILRDDQRVKIVINEIPDRVRGFEEEFIHLLSNITGAIVNTDNVQFHVDKKGRVNFAQTELLIHVVNRDTNRILDVDRVIQMIDENKEQLRNLFRNYNVLDVQPAISVRLPDDMSALQMAIIVLAILLFLAAMLFVLMNWYYRTVHKRKLKAIVAGSAGNRGFIDIMDMPNTNKYSFDGANPVWLDPFCRNLELAAQAEHEDDLPENLSEIADLWNSPTRTHGTFGREPAAVKPDDDRYLRAAIQEYDNIAKLGQIIREGPIKGSLLKVVLEDYLRLKKLFAQRMVQKASSCHSSISELIQTELDEEPGDHSPGQGSLRFRHKPPVELKGPDGIHVVHGSTGTLLATDLNSLPEEDQKGLGRSLETLTAAEATAFERNARTESAKSTPLHKLRDVIMETPLEITEL

SEQ ID NO: 286 - protein, 1955 aa, Homo sapiens [sequence omitted]

SEQ ID NO: 287 - protein, 1401 aa, Homo sapiens
  PROTOCADHERIN RELATED 15 (PCDH15), ISOFORM CRA_A <Accession No.: EAW54151.1>
MFRQFYLWTCLASGIILGSLFEICLGQYDDDCKLARGGPPATIVAIDEESRNGTILVDNMLIKGTAGGPDPTIELSLKDNVDYWVLMDPVKQMLFLNSTGRVLDRDPPMNIHSIVVQVQCINKKVGTIIYHEVRIVVRDRNDNSPTFKHESYYATVNELTPVGTTIFTGFSGDNGATDIDDGPNGQIEYVIQYNPDDPTSNDTFEIPLMLTGNIVLRKRLNYEDKTRYFVIIQANDRAQNLNERRTTTTTLTVDVLDGDDLGPMFLPCVLVPNTRDCRPLTYQAAIPELRTPEELNPIIVTPPIQAIDQDRNIQPPSDRPGILYSILVGTPEDYPRFFHMHPRTAELSLLEPVNRDFHQKFDLVIKAEQDNGHPLPAFAGLHIEILDENNQSPYFTMPSYQGYILESAPVGATISDSLNLTSPLRIVALDKDIEDTKDPELHLFLNDYTSVFTVTQTGITRYLTLLQPVDREEQQTYTFSITAFDGVQESEPVIVNIQVMDANDNTPTFPEISYDVYVYTDMRPGDSVIQLTAVDADEGSNGEITYEILVGAQGDFIINKTTGLITIAPGVEMIVGRTYALTVQAADNAPPAERRNSICTVYIEVLPPNNQSPPRFPQLMYSLEISEAMRVGAVLLNLQATDREGDSITYAIENGDPQRVFNLSETTGILTLGKALDRESTDRYILIITASDGRPDGTSTATVNIVVTDVNDNAPVFDPYLPRNLSVVEEEANAFVGQVKATDPDAGINGQVHYSLGNFNNLFRITSNGSIYTAVKLNREVRDYYELVVVATDGAVHPRHSTLTLAIKVLDIDDNSPVFTNSTYTVLVEENLPAGTTILQIEAKDVDLGANVSYRIRSPEVKHFFALHPFTGELSLLRSLDYEAFPDQEASITFLVEAFDIYGTMPPGIATVTVIVKDMNDYPPVFSKRIYKGMVAPDAVKGTPITTVYAEDADPPGLPASRVRYRVDDVQFPYPASIFEVEEDSGRVITRVNLNEEPTTIFKLVVVAFDDGEPVMSSSATVKILVLHPGEIPRFTQEEYRPPPVSELATKGTMVGVISAAAINQSIVYSIVSGNEEDTFGINNITGVIYVNGPLDYETRTSYVLRVQADSLEVVLANLRVPSKSNTAKVYIEIQDENNHPPVFQKKFYIGGVSEDARMFTSVLRVKATDKDTGNYSVMAYRLIIPPIKEGKEGFVVETYTGLIKTAMLFHNMRRSYFKFQVIATDDYGKGLSGKADVLVSVVNQLDMQVIVSNVPPTLVEKKIEDLTEILDRYVQEQIPGAKVVVESIGARRHGDAFSLEDYTKCDLTVYAIDPQTNRAIDRNELFKFLDGKLLDINKDFQPYYGEGGRILEIRTPEAVTSIKKRGESLGYTEGALLALAFIIILCCIPAILVVLVSYRQ

SEQ ID NO: 288 - protein, 1783 aa, Homo sapiens
  PROTOCADHERIN RELATED 15 (PCDH15), ISOFORM X1 <Accession No.: XP_016872062.1>
MFRQFYLWTCLASGIILGSLFEICLGQYDDDWQYEDCKLARGGPPATIVAIDEESRNGTILVDNMLIKGTAGGPDPTIELSLKDNVDYWVLMDPVKQMLFLNSTGRVLDRDPPMNIHSIVVQVQCINKKVGTIIYHEVRIVVRDRNDNSPTFKHESYYATVNELTPVGTTIFTGFSGDNGATDIDDGPNGQIEYVIQYNPDDPTSNDTFEIPLMLTGNIVLRKRLNYEDKTRYFVIIQANDRAQNLNERRTTTTTLTVDVLDGDDLGPMFLPCVLVPNTRDCRPLTYQAAIPELRTPEELNPIIVTPPIQAIDQDRNIQPPSDRPGILYSILVGTPEDYPRFFHMHPRTAELSLLEPVNRDFHQKFDLVIKAEQDNGHPLPAFAGLHIEILDENNQSPYFTMPSYQGYILESAPVGATISDSLNLTSPLRIVALDKDIEDTKDPELHLFLNDYTSVFTVTQTGITRYLTLLQPVDREEQQTYTFSITAFDGVQESEPVIVNIQVMDANDNTPTFPEISYDVYVYTDMRPGDSVIQLTAVDADEGSNGEITYEILVGAQGDFIINKTTGLITIAPGVEMIVGRTYALTVQAADNAPPAERRNSICTVYIEVLPPNNQSPPRFPQLMYSLEISEAMRVGAVLLNLQATDREGDSITYAIENGDPQRVFNLSETTGILTLGKALDRESTDRYILIITASDGRPDGTSTATVNIVVTDVNDNAPVFDPYLPRNLSVVEEEANAFVGQVKATDPDAGINGQVHYSLGNFNNLFRITSNGSIYTAVKLNREVRDYYELVVVATDGAVHPRHSTLTLAIKVLDIDDNSPVFTNSTYTVLVEENLPAGTTILQIEAKDVDLGANVSYRIRSPEVKHFFALHPFTGELSLLRSLDYEAFPDQEASITFLVEAFDIYGTMPPGIATVTVIVKDMNDYPPVFSKRIYKGMVAPDAVKGTPITTVYAEDADPPGLPASRVRYRVDDVQFPYPASIFEVEEDSGRVITRVNLNEEPTTIFKLVVVAFDDGEPVMSSSATVKILVLHPGEIPRFTQEEYRPPPVSELATKGTMVGVISAAAINQSIVYSIVSGNEEDTFGINNITGVIYVNGPLDYETRTSYVLRVQADSLEVVLANLRVPSKSNTAKVYIEIQDENNHPPVFQKKFYIGGVSEDARMFTSVLRVKATDKDTGNYSVMAYRLIIPPIKEGKEGFVVETYTGLIKTAMLFHNMRRSYFKFQVIATDDYGKGLSGKADVLVSVVNQLDMQVIVSNVPPTLVEKKIEDLTEILDRYVQEQIPGAKVVVESIGARRHGDAFSLEDYTKCDLTVYAIDPQTNRAIDRNELFKFLDGKLLDINKDFQPYYGEGGRILEIRTPEAVTSIKKRGESLGYTEGALLALAFIIILCCIPAILVVLVSYRQFKVRQAECTKTARIQAALPAAKPAVPAPAPVAAPPPPPPPPPGAHLYEELGDSSMHKYEMPQYGSRRRLLPPAGQEEYGEVVGEAEEEYEEEEEEPKKIKKPKVEIREPSEEEEVVVTIEKPPAAEPTYTTWKRARIFPMIFKKVRGLADKRGIVDLEGEEWQRRLEEEDKDYLKLTLDQEEATESTVESEEESSSDYTEYSEEESEFSESETTEEESESETPSEEEESSTPESEESESTESEGEKARKNIVLARRRPMVEEVKEVKGRKEEPQEEQKEPKMEEEEHSEEEESGPAPVEESTDPEAQDIPEEGSAESASVEGGVESEEESESGSSSSSSESQSGGPWGYQVPAYDRSKNANQKKSPGANSEGYNTAL

SEQ ID NO: 289 - protein, 1546 aa, Homo sapiens
  USHERIN (USH2A), ISOFORM A <Accession No.: NP_009054.5>
MNCPVLSLGSGFLFQVIEMLIFAYFASISLTESRGLFPRLENVGAFKKVSIVPTQAVCGLPDRSTFCHSSAAAESIQFCTQRFCIQDCPYRSSHPTYTALFSAGLSSCITPDKNDLHPNAHSNSASFIFGNHKSCFSSPPSPKLMASFTLAVWLKPEQQGVMCVIEKTVDGQIVFKLTISEKETMFYYRTVNGLQPPIKVMTLGRILVKKWIHLSVQVHQTKISFFINGVEKDHTPFNARTLSGSITDFASGTVQIGQSLNGLEQFVGRMQDFRLYQVALTNREILEVFSGDLLRLHAQSHCRCPGSHPRVHPLAQRYCIPNDAGDTADNRVSRLNPEAHPLSFVNDNDVGTSWVSNVFTNITQLNQGVTISVDLENGQYQVFYIIIQFFSPQPTEIRIQRKKENSLDWEDWQYFARNCGAFGMKNNGDLEKPDSVNCLQLSNFTPYSRGNVTFSILTPGPNYRPGYNNFYNTPSLQEFVKATQIRFHFHGQYYTTETAVNLRHRYYAVDEITISGRCQCHGHADNCDTTSQPYRCLCSQESFTEGLHCDRCLPLYNDKPFRQGDQVYAFNCKPCQCNSHSKSCHYNISVDPFPFEHFRGGGGVCDDCEHNTTGRNCELCKDYFFRQVGADPSAIDVCKPCDCDTVGTRNGSILCDQIGGQCNCKRHVSGRQCNQCQNGFYNLQELDPDGCSPCNCNTSGTVDGDITCHQNSGQCKCKANVIGLRCDHCNFGFKFLRSFNDVGCEPCQCNLHGSVNKFCNPHSGQCECKKEAKGLQCDTCRENFYGLDVTNCKACDCDTAGSLPGTVCNAKTGQCICKPNVEGRQCNKCLEGNFYLRQNNSFLCLPCNCDKTGTINGSLLCNKSTGQCPCKLGVTGLRCNQCEPHRYNLTIDNFQHCQMCECDSLGTLPGTICDPISGQCLCVPNRQGRRCNQCQPGFYISPGNATGCLPCSCHTTGAVNHICNSLTGQCVCQDASIAGQRCDQCKDHYFGFDPQTGRCQPCNCHLSGALNETCHLVTGQCFCKQFVTGSKCDACVPSASHLDVNNLLGCSKTPFQQPPPRGQVQSSSAINLSWSPPDSPNAHWLTYSLLRDGFEIYTTEDQYPYSIQYFLDTDLLPYTKYSYYIETTNVHGSTRSVAVTYKTKPGVPEGNLTLSYIIPIGSDSVTLTWTTLSNQSGPIEKYILSCAPLAGGQPCVSYEGHETSATIWNLVPFAKYDFSVQACTSGGCLHSLPITVTTAQAPPQRLSPPKMQKISSTELHVEWSPPAELNGIIIRYELYMRRLRSTKETTSEESRVFQSSGWLSPHSFVESANENALKPPQTMTTITGLEPYTKYEFRVLAVNMAGSVSSAWVSERTGESAPVFMIPPSVFPLSSYSLNISWEKPADNVTRGKVVGYDINMLSEQSPQQSIPMAFSQLLHTAKSQELSYTVEGLKPYRIYEFTITLCNSVGCVTSASGAGQTLAAAPAQLRPPLVKGINSTTIHLKWFPPEELNGPSPIYQLERRESSLPALMTTMMKGIRFIGNGYCKFPSSTHPVNTDFTGKCV

SEQ ID NO: 290 - protein, 5202 aa, Homo sapiens
  USHERIN (USH2A), ISOFORM B PRECURSOR  <Accession No.: NP_996816.2>
MNCPVLSLGSGFLFQVIEMLIFAYFASISLTESRGLFPRLENVGAFKKVSIVPTQAVCGLPDRSTFCHSSAAAESIQFCTQRFCIQDCPYRSSHPTYTALFSAGLSSCITPDKNDLHPNAHSNSASFIFGNHKSCFSSPPSPKLMASFTLAVWLKPEQQGVMCVIEKTVDGQIVFKLTISEKETMFYYRTVNGLQPPIKVMTLGRILVKKWIHLSVQVHQTKISFFINGVEKDHTPFNARTLSGSITDFASGTVQIGQSLNGLEQFVGRMQDFRLYQVALTNREILEVFSGDLLRLHAQSHCRCPGSHPRVHPLAQRYCIPNDAGDTADNRVSRLNPEAHPLSFVNDNDVGTSWVSNVFTNITQLNQGVTISVDLENGQYQVFYIIIQFFSPQPTEIRIQRKKENSLDWEDWQYFARNCGAFGMKNNGDLEKPDSVNCLQLSNFTPYSRGNVTFSILTPGPNYRPGYNNFYNTPSLQEFVKATQIRFHFHGQYYTTETAVNLRHRYYAVDEITISGRCQCHGHADNCDTTSQPYRCLCSQESFTEGLHCDRCLPLYNDKPFRQGDQVYAFNCKPCQCNSHSKSCHYNISVDPFPFEHFRGGGGVCDDCEHNTTGRNCELCKDYFFRQVGADPSAIDVCKPCDCDTVGTRNGSILCDQIGGQCNCKRHVSGRQCNQCQNGFYNLQELDPDGCSPCNCNTSGTVDGDITCHQNSGQCKCKANVIGLRCDHCNFGFKFLRSFNDVGCEPCQCNLHGSVNKFCNPHSGQCECKKEAKGLQCDTCRENFYGLDVTNCKACDCDTAGSLPGTVCNAKTGQCICKPNVEGRQCNKCLEGNFYLRQNNSFLCLPCNCDKTGTINGSLLCNKSTGQCPCKLGVTGLRCNQCEPHRYNLTIDNFQHCQMCECDSLGTLPGTICDPISGQCLCVPNRQGRRCNQCQPGFYISPGNATGCLPCSCHTTGAVNHICNSLTGQCVCQDASIAGQRCDQCKDHYFGFDPQTGRCQPCNCHLSGALNETCHLVTGQCFCKQFVTGSKCDACVPSASHLDVNNLLGCSKTPFQQPPPRGQVQSSSAINLSWSPPDSPNAHWLTYSLLRDGFEIYTTEDQYPYSIQYFLDTDLLPYTKYSYYIETTNVHGSTRSVAVTYKTKPGVPEGNLTLSYIIPIGSDSVTLTWTTLSNQSGPIEKYILSCAPLAGGQPCVSYEGHETSATIWNLVPFAKYDFSVQACTSGGCLHSLPITVTTAQAPPQRLSPPKMQKISSTELHVEWSPPAELNGIIIRYELYMRRLRSTKETTSEESRVFQSSGWLSPHSFVESANENALKPPQTMTTITGLEPYTKYEFRVLAVNMAGSVSSAWVSERTGESAPVFMIPPSVFPLSSYSLNISWEKPADNVTRGKVVGYDINMLSEQSPQQSIPMAFSQLLHTAKSQELSYTVEGLKPYRIYEFTITLCNSVGCVTSASGAGQTLAAAPAQLRPPLVKGINSTTIHLKWFPPEELNGPSPIYQLERRESSLPALMTTMMKGIRFIGNGYCKFPSSTHPVNTDFTGIKASFRTKVPEGLIVFAASPGNQEEYFALQLKKGRLYFLFDPQGSPVEVTTTNDHGKQYSDGKWHEIIAIRHQAFGQITLDGIYTGSSAILNGSTVIGDNTGVFLGGLPRSYTILRKDPEIIQKGFVGCLKDVHFMKNYNPSAIWEPLDWQSSEEQINVYNSWEGCPASLNEGAQFLGAGFLELHPYMFHGGMNFEISFKFRTDQLNGLLLFVYNKDGPDFLAMELKSGILTFRLNTSLAFTQVDLLLGLSYCNGKWNKVIIKKEGSFISASVNGLMKHASESGDQPLVVNSPVYVGGIPQELLNSYQHLCLEQGFGGCMKDVKFTRGAVVNLASVSSGAVRVNLDGCLSTDSAVNCRGNDSILVYQGKEQSVYEGGLQPFTEYLYRVIASHEGGSVYSDWSRGRTTGAAPQSVPTPSRVRSLNGYSIEVTWDEPVVRGVIEKYILKAYSEDSTRPPRMPSASAEFVNTSNLTGILTGLLPFKNYAVTLTACTLAGCTESSHALNISTPQEAPQEVQPPVAKSLPSSLLLSWNPPKKANGIITQYCLYMDGRLIYSGSEENYTVTDLAVFTPHQFLLSACTHVGCTNSSWVLLYTAQLPPEHVDSPVLTVLDSRTIHIQWKQPRKISGILERYVLYMSNHTHDFTIWSVIYNSTELFQDHMLQYVLPGNKYLIKLGACTGGGCTVSEASEALTDEDIPEGVPAPKAHSYSPDSFNVSWTEPEYPNGVITSYGLYLDGILIHNSSELSYRAYGFAPWSLHSFRVQACTAKGCALGPLVENRTLEAPPEGTVNVFVKTQGSRKAHVRWEAPFRPNGLLTHSVLFTGIFYVDPVGNNYTLLNVTKVMYSGEETNLWVLIDGLVPFTNYTVQVNISNSQGSLITDPITIAMPPGAPDGVLPPRLSSATPTSLQVVWSTPARNNAPGSPRYQLQMRSGDSTHGFLELFSNPSASLSYEVSDLQPYTEYMFRLVASNGFGSAHSSWIPFMTAEDKPGPVVPPILLDVKSRMMLVTWQHPRKSNGVITHYNIYLHGRLYLRTPGNVTNCTVMHLHPYTAYKFQVEACTSKGCSLSPESQTVWTLPGAPEGIPSPELFSDTPTSVIISWQPPTHPNGLVENFTIERRVKGKEEVTTLVTLPRSHSMRFIDKTSALSPWTKYEYRVLMSTLHGGTNSSAWVEVTTRPSRPAGVQPPVVTVLEPDAVQVTWKPPLIQNGDILSYEIHMPDPHITLTNVTSAVLSQKVTHLIPFTNYSVTIVACSGGNGYLGGCTESLPTYVTTHPTVPQNVGPLSVIPLSESYVVISWQPPSKPNGPNLRYELLRRKIQQPLASNPPEDLNRWHNIYSGTQWLYEDKGLSRFTTYEYMLFVHNSVGFTPSREVTVTTLAGLPERGANLTASVLNHTAIDVRWAKPTVQDLQGEVEYYTLFWSSATSNDSLKILPDVNSHVIGHLKPNTEYWIFISVFNGVHSINSAGLHATTCDGEPQGMLPPEVVIINSTAVRVIWTSPSNPNGVVTEYSIYVNNKLYKTGMNVPGSFILRDLSPFTIYDIQVEVCTIYACVKSNGTQITTVEDTPSDIPTPTIRGITSRSLQIDWVSPRKPNGIILGYDLLWKTWYPCAKTQKLVQDQSDELCKAVRCQKPESICGHICYSSEAKVCCNGVLYNPKPGHRCCEEKYIPFVLNSTGVCCGGRIQEAQPNHQCCSGYYARILPGEVCCPDEQHNRVSVGIGDSCCGRMPYSTSGNQICCAGRLHDGHGQKCCGRQIVSNDLECCGGEEGVVYNRLPGMFCCGQDYVNMSDTICCSASSGESKAHIKKNDPVPVKCCETELIPKSQKCCNGVGYNPLKYVCSDKISTGMMMKETKECRILCPASMEATEHCGRCDFNFTSHICTVIRGSHNSTGKASIEEMCSSAEETIHTGSVNTYSYTDVNLKPYMTYEYRISAWNSYGRGLSKAVRARTKEDVPQGVSPPTWTKIDNLEDTIVLNWRKPIQSNGPIIYYILLRNGIERFRGTSLSFSDKEGIQPFQEYSYQLKACTVAGCATSSKVVAATTQGVPESILPPSITALSAVALHLSWSVPEKSNGVIKEYQIRQVGKGLIHTDTTDRRQHTVTGLQPYTNYSFTLTACTSAGCTSSEPFLGQTLQAAPEGVWVTPRHIIINSTTVELYWSLPEKPNGLVSQYQLSRNGNLLFLGGSEEQNFTDKNLEPNSRYTYKLEVKTGGGSSASDDYIVQTPMSTPEEIYPPYNITVIGPYSIFVAWIPPGILIPEIPVEYNVLLNDGSVTPLAFSVGHHQSTLLENLTPFTQYEIRIQACQNGSCGVSSRMFVKTPEAAPMDLNSPVLKALGSACIEIKWMPPEKPNGIIINYFIYRRPAGIEEESVLFVWSEGALEFMDEGDTLRPFTLYEYRVRACNSKGSVESLWSLTQTLEAPPQDFPAPWAQATSAHSVLLNWTKPESPNGIISHYRVVYQERPDDPTFNSPTVHAFTVKGTSHQAHLYGLEPFTTYRIGVVAANHAGEILSPWTLIQTLESSPSGLRNFIVEQKENGRALLLQWSEPMRTNGVIKTYNIFSDGFLEYSGLNRQFLFRRLDPFTLYTLTLEACTRAGCAHSAPQPLWTDEAPPDSQLAPTVHSVKSTSVELSWSEPVNPNGKIIRYEVIRRCFEGKAWGNQTIQADEKIVFTEYNTERNTFMYNDTGLQPWTQCEYKIYTWNSAGHTCSSWNVVRTLQAPPEGLSPPVISYVSMNPQKLLISWIPPEQSNGIIQSYRLQRNEMLYPFSFDPVTFNYTDEELLPFSTYSYALQACTSGGCSTSKPTSITTLEAAPSEVSPPDLWAVSATQMNVCWSPPTVQNGKITKYLVRYDNKESLAGQGLCLLVSHLQPYSQYNFSLVACTNGGCTASVSKSAWTMEALPENMDSPTLQVTGSESIEITWKPPRNPNGQIRSYELRRDGTIVYTGLETRYRDFTLTPGVEYSYTVTASNSQGGILSPLVKDRTSPSAPSGMEPPKLQARGPQEILVNWDPPVRTNGDIINYTLFIRELFERETKIIHINTTHNSFGMQSYIVNQLKPFHRYEIRIQACTTLGCASSDWTFIQTPEIAPLMQPPPHLEVQMAPGGFQPTVSLLWTGPLQPNGKVLYYELYRRQIATQPRKSNPVLIYNGSSTSFIDSELLPFTEYEYQVWAVNSAGKAPSSWTWCRTGPAPPEGLRAPTFHVISSTQAVVNISAPGKPNGIVSLYRLFSSSAHGAETVLSEGMATQQTLHGLQAFTNYSIGVEACTCFNCCSKGPTAELRTHPAPPSGLSSPQIGTLASRTASFRWSPPMFPNGVIHSYELQFHVACPPDSALPCTPSQIETKYTGLGQKASLGGLQPYTTYKLRVVAHNEVGSTASEWISFTTQKELPQYRAPFSVDSNLSVVCVNWSDTFLLNGQLKEYVLTDGGRRVYSGLDTTLYIPRTADKTFFFQVICTTDEGSVKTPLIQYDTSTGLGLVLTTPGKKKGSRSKSTEFYSELWFIVLMAMLGLILLAIFLSLILQRKIHKEPYIRERPPLVPLQKRMSPLNVYPPGENHMGLADTKIPRSGTPVSIRSNRSACVLRIPSQNQTSLTYSQGSLHRSVSQLMDIQDKKVLMDNSLWEAIMGHNSGLYVDEEDLMNAIKDFSSVTKERTTFTDTHL

SEQ ID NO: 291 - protein, 1546 aa, Homo sapiens [sequence omitted]

SEQ ID NO: 292 - protein, 232 aa, Homo sapiens
  CLARIN 1 (CLRN1) <Accession No.: AAH74971.1>
MPSQQKKIIFCMAGVFSFACALGVVTALGTPLWIKATVLCKTGALLVNASGQELDKFMGEMQYGLFHGEGVRQCGLGARPFRFSFFPDLLKAIPVSIHVNVILFSAILIVLTMVGTAFFMYNAFGKPFETLHGPLGLYLLSFISGSCGCLVMILFASEVKIHHLSEKIANYKEGTYVYKTQSEKYTTSFWVIFFCFFVHFLNGLLIRLAGFQFPFAKSKDAETTNVAADLMY

SEQ ID NO: 293 - protein, 232 aa, Homo sapiens; identical to SEQ ID NO: 292
  CLARIN 1 (CLRN1), ISOFORM A <Accession No.: NP_777367.1>

SEQ ID NO: 294 - protein, 245 aa, Homo sapiens
  CLARIN 1 (CLRN1), ISOFORM D <Accession No.: NP_001182723.1>
MPSQQKKIIFCMAGVFSFACALGVVTALGTPLWIKATVLCKTGALLVNASGQELDKFMGEMQYGLFHGEGVRQCGLGARPFRFSFFPDLLKAIPVSIHVNVILFSAILIVLTMVGTAFFMYNAFGKPFETLHGPLGLYLLSFISVALWLPATRHQAQGSCGCLVMILFASEVKIHHLSEKIANYKEGTYVYKTQSEKYTTSFWVIFFCFFVHFLNGLLIRLAGFQFPFAKSKDAETTNVAADLMY

SEQ ID NO: 295 - protein, 120 aa, Homo sapiens
  CLARIN 1 (CLRN1), ISOFORM C <Accession No.: NP_443721.1>
MQALQQQPVFPDLLKAIPVSIHVNVILFSAILIVLTMVGTAFFMYNAFGKPFETLHGPLGLYLLSFISGSCGCLVMILFASEVKIHHLSEKIANYKEGTYVYKTQSEKYTTSFWLTKGHS

SEQ ID NO: 296 - protein, 185 aa, Homo sapiens
  CLARIN 1 (CLRN1), ISOFORM E <Accession No.: NP_001243748.1>
MPSQQKKIIFCMAGVFSFACALGVVTALGTPLWIKATVLCKTGALLVNASGQELDKFMGEMQYGLFHGEGVRQCGLGARPFRFSCYFLDPFMGLPTGVPHLLSLPCSTSCRREHTSERVQEPAGCFSAVRSKLHAGPAAATSFSRFAQSNPSEHPRQCHSLLCHPYCVNHGGDSLLHVQCFWKTF

SEQ ID NO: 297 - protein, 2273 aa, Homo sapiens [sequence omitted]

SEQ ID NO: 298 - protein, 2273 aa, Homo sapiens [sequence omitted]

SEQ ID NO: 299 - protein, 1203 aa, Homo sapiens [sequence omitted]

SEQ ID NO: 300 - protein, 2256 aa, Homo sapiens [sequence omitted]

SEQ ID NO: 301 - protein, 314 aa, Homo sapiens
  ELOVL FATTY ACID ELONGASE 4 (ELOVL4) <Accession No.: NP_073563.1>
MGLLDSEPGSVLNVVSTALNDTVEFYRWTWSIADKRVENWPLMQSPWPTLSISTLYLLFVWLGPKWMKDREPFQMRLVLIIYNFGMVLLNLFIFRELFMGSYNAGYSYICQSVDYSNNVHEVRIAAALWWYFVSKGVEYLDTVFFILRKKNNQVSFLHVYHHCTMFTLWWIGIKWVAGGQAFFGAQLNSFIHVIMYSYYGLTAFGPWIQKYLWWKRYLTMLQLIQFHVTIGHTALSLYTDCPFPKWMHWALIAYAISFIFLFLNFYIRTYKEPKKPKAGKTAMNGISANGVSKSEKQLMIENGKKQKNGKAKGD

SEQ ID NO: 302 - protein, 212 aa, Homo sapiens
  INTERLEUKIN 6 (IL6)  <Accession No.: AAC41704.1>
MNSFSTSAFGPVAFSLGLLLVLPAAFPAPVPPGEDSKDVAAPHRQPLTSSERIDKQIRYILDGISALRKETCNKSNMCESSKEALAENNLNLPKMAEKDGCFQSGFNEETCLVKIITGLLEFEVYLEYLQNRFESSEEQARAVQMSTKVLIQFLQKKAKNLDAITTPDPTTNASLLTKLQAQNQWLQDMTTHLILRSFKEFLQSSLRALRQM

SEQ ID NO: 303 - protein, 233 aa, Homo sapiens
  TNF-ALPHA (TNF)  <Accession No.: CAA26669.1>
MSTESMIRDVELAEEALPKKTGGPQGSRRCLFLSLFSFLIVAGATTLFCLLHFGVIGPQREEFPRDLSLISPLAQAVRSSSRTPSDKPVAHVVANPQAEGQLQWLNRRANALLANGVELRDNQLVVPSEGLYLIYSQVLFKGQGCPSTHVLLTHTISRIAVSYQTKVNLLSAIKSPCQRETPEGAEAKPWYEPIYLGGVFQLEKGDRLSAEINRPDYLDFAESGQVYFGIIAL

SEQ ID NO: 304 - protein, 364 aa, Homo sapiens
  L OPSIN (OPN1LW) <Accession No.: NP_064445.2>
MAQQWSLQRLAGRHPQDSYEDSTQSSIFTYTNSNSTRGPFEGPNYHIAPRWVYHLTSVWMIFVVTASVFTNGLVLAATMKFKKLRHPLNWILVNLAVADLAETVIASTISIVNQVSGYFVLGHPMCVLEGYTVSLCGITGLWSLAIISWERWMVVCKPFGNVRFDAKLAIVGIAFSWIWAAVWTAPPIFGWSRYWPHGLKTSCGPDVFSGSSYPGVQSYMIVLMVTCCIIPLAIIMLCYLQVWLAIRAVAKQQKESESTQKAEKEVTRMVVVMIFAYCVCWGPYTFFACFAAANPGYAFHPLMAALPAYFAKSATIYNPVIYVFMNRQFRNCILQLFGKKVDDGSELSSASKTEVSSVSSVSPA

SEQ ID NO: 305 - protein, 364 aa, Homo sapiens
  M OPSIN (OPN1MW) <Accession No.: NP_000504.1>
MAQQWSLQRLAGRHPQDSYEDSTQSSIFTYTNSNSTRGPFEGPNYHIAPRWVYHLTSVWMIFVVIASVFTNGLVLAATMKFKKLRHPLNWILVNLAVADLAETVIASTISVVNQVYGYFVLGHPMCVLEGYTVSLCGITGLWSLAIISWERWMVVCKPFGNVRFDAKLAIVGIAFSWIWAAVWTAPPIFGWSRYWPHGLKTSCGPDVFSGSSYPGVQSYMIVLMVTCCITPLSIIVLCYLQVWLAIRAVAKQQKESESTQKAEKEVTRMVVVMVLAFCFCWGPYAFFACFAAANPGYPFHPLMAALPAFFAKSATIYNPVIYVFMNRQFRNCILQLFGKKVDDGSELSSASKTEVSSVSSVSPA

SEQ ID NO: 306 - protein, 1103 aa, Homo sapiens
  GUANYLATE CYCLASE 2D, RETINAL (GUCY2D) <Accession No.: Q02846.2>
MTACARRAGGLPDPGLCGPAWWAPSLPRLPRALPRLPLLLLLLLLQPPALSAVFTVGVLGPWACDPIFSRARPDLAARLAAARLNRDPGLAGGPRFEVALLPEPCRTPGSLGAVSSALARVSGLVGPVNPAACRPAELLAEEAGIALVPWGCPWTQAEGTTAPAVTPAADALYALLRAFGWARVALVTAPQDLWVEAGRSLSTALRARGLPVASVTSMEPLDLSGAREALRKVRDGPRVTAVIMVMHSVLLGGEEQRYLLEAAEELGLTDGSLVFLPFDTIHYALSPGPEALAALANSSQLRRAHDAVLTLTRHCPSEGSVLDSLRRAQERRELPSDLNLQQVSPLFGTIYDAVFLLARGVAEARAAAGGRWVSGAAVARHIRDAQVPGFCGDLGGDEEPPFVLLDTDAAGDRLFATYMLDPARGSFLSAGTRMHFPRGGSAPGPDPSCWFDPNNICGGGLEPGLVFLGFLLVVGMGLAGAFLAHYVRHRLLHMQMVSGPNKIILTVDDITFLHPHGGTSRKVAQGSRSSLGARSMSDIRSGPSQHLDSPNIGVYEGDRVWLKKFPGDQHIAIRPATKTAFSKLQELRHENVALYLGLFLARGAEGPAALWEGNLAVVSEHCTRGSLQDLLAQREIKLDWMFKSSLLLDLIKGIRYLHHRGVAHGRLKSRNCIVDGRFVLKITDHGHGRLLEAQKVLPEPPRAEDQLWTAPELLRDPALERRGTLAGDVFSLAIIMQEVVCRSAPYAMLELTPEEVVQRVRSPPPLCRPLVSMDQAPVECILLMKQCWAEQPELRPSMDHTFDLFKNINKGRKTNIIDSMLRMLEQYSSNLEDLIRERTEELELEKQKTDRLLTQMLPPSVAEALKTGTPVEPEYFEQVTLYFSDIVGFTTISAMSEPIEVVDLLNDLYTLFDAIIGSHDVYKVETIGDAYMVASGLPQRNGQRHAAEIANMSLDILSAVGTFRMRHMPEVPVRIRIGLHSGPCVAGVVGLTMPRYCLFGDTVNTASRMESTGLPYRIHVNLSTVGILRALDSGYQVELRGRTELKGKGAEDTFWLVGRRGFNKPIPKPPDLQPGSSNHGISLQEIPPERRRKLEKARPGQFS

SEQ ID NO: 307 - protein, 533 aa, Homo sapiens
  RETINOID ISOMEROHYDROLASE RPE65 (RPE65) <Accession No.: NP_000320.1>
MSIQVEHPAGGYKKLFETVEELSSPLTAHVTGRIPLWLTGSLLRCGPGLFEVGSEPFYHLFDGQALLHKFDFKEGHVTYHRRFIRTDAYVRAMTEKRIVITEFGTCAFPDPCKNIFSRFFSYFRGVEVTDNALVNVYPVGEDYYACTETNFITKINPETLETIKQVDLCNYVSVNGATAHPHIENDGTVYNIGNCFGKNFSIAYNIVKIPPLQADKEDPISKSEIVVQFPCSDRFKPSYVHSFGLTPNYIVFVETPVKINLFKFLSSWSLWGANYMDCFESNETMGVWLHIADKKRKKYLNNKYRTSPFNLFHHINTYEDNGFLIVDLCCWKGFEFVYNYLYLANLRENWEEVKKNARKAPQPEVRRYVLPLNIDKADTGKNLVTLPNTTATAILCSDETIWLEPEVLFSGPRQAFEFPQINYQKYCGKPYTYAYGLGLNHFVPDRLCKLNVKTKETWVWQEPDSYPSEPIFVSHPDALEEDDGVVLSVVVSPGAGQKPAYLLILNAKDLSEVARAEVEINIPVTFHGLFKKS

SEQ ID NO: 308 - protein, 441 aa, Homo sapiens
  RETINOID ISOMEROHYDROLASE RPE65 (RPE65), ISOFORM X1 <Accession No.: XP_016857516.1>
MTEKRIVITEFGTCAFPDPCKNIFSRFFSYFRGVEVTDNALVNVYPVGEDYYACTETNFITKINPETLETIKQVDLCNYVSVNGATAHPHIENDGTVYNIGNCFGKNFSIAYNIVKIPPLQADKEDPISKSEIVVQFPCSDRFKPSYVHSFGLTPNYIVFVETPVKINLFKFLSSWSLWGANYMDCFESNETMGVWLHIADKKRKKYLNNKYRTSPFNLFHHINTYEDNGFLIVDLCCWKGFEFVYNYLYLANLRENWEEVKKNARKAPQPEVRRYVLPLNIDKADTGKNLVTLPNTTATAILCSDETIWLEPEVLFSGPRQAFEFPQINYQKYCGKPYTYAYGLGLNHFVPDRLCKLNVKTKETWVWQEPDSYPSEPIFVSHPDALEEDDGVVLSVVVSPGAGQKPAYLLILNAKDLSEVARAEVEINIPVTFHGLFKKS

SEQ ID NO: 309 - protein, 360 aa, Homo sapiens
  ARYL HYDROCARBON RECEPTOR INTERACTING PROTEIN LIKE 1 (AIPL1) <Accession No.: CAH25996.1>
MDAALLLNVEGVKKTILHGGTGELPNFITGSRVIFHFRTMKCDEERTVIDDSRQVGQPMHIIIGNMFKLEVWEILLTSMRVHEVAEFWCDTIHTGVYPILSRSLRQMAQGKDPTEWHVHTCGLANMFAYHTLGYEDLDELQKEPQPLVFVIELLQVDAPSDYQRETWNLSNHEKMKAVPVLHGEGNRLFKLGRYEEASSKYQEAIICLRNLQTKCLLKKEEYYEVLEHTSDILRHHPGIVKAYYVRARAHAEVWNEAEAKADLQKVLELEPSMQKAVRRELRLLENRMAEKQEEERLRCRNMLSQGATQPPAEPPTEPPAQSSTEPPAEPPTAPSAELSAGPPAEPATEPPPSPGHSLQH

SEQ ID NO: 310 - protein, 362 aa, Homo sapiens
  ARYL HYDROCARBON RECEPTOR INTERACTING PROTEIN LIKE 1 (AIPL1) <Accession No.: CAH25995.1>
MDAALLLNVEGVKKTILHGGTGELPNFITGSRVGQPMHIIIGNMFKLEVWEILLTSMRVHEVAEFWCDTIHTGVYPILSRSLRQMAQGKDPTEWHVHTCGLANMFAYHTLGYEDLDELQKEPQPLVFVIELLQVDAPSDYQRETWNLSNHEKMKAVPVLHGEGNRLFKLGRYEEASSKYQEAIICLRNLQTKEKPWEVQWLKLEKMINTLILNYCQCLLKKEEYYEVLEHTSDILRHHPGIVKAYYVRARAHAEVWNEAEAKADLQKVLELEPSMQKAVRRELRLLENRMAEKQEEERLRCRNMLSQGATQPPAEPPTEPPAQSSTEPPAEPPTAPSAELSAGPPAEPATEPPPSPGHSLQH

SEQ ID NO: 311 - protein, 321 aa, Homo sapiens [sequence omitted]

SEQ ID NO: 312 - protein, 324 aa, Homo sapiens [sequence omitted]

SEQ ID NO: 313 - protein, 384 aa, Homo sapiens
  ARYL HYDROCARBON RECEPTOR INTERACTING PROTEIN LIKE 1 (AIPL1) <Accession No.: AAH12055.1>
MDAALLLNVEGVKKTILHGGTGELPNFITGSRVIFHFRTMKCDEERTVIDDSRQVGQPMHIIIGNMFKLEVWEILLTSMRVHEVAEFWCDTIHTGVYPILSRSLRQMAQGKDPTEWHVHTCGLANMFAYHTLGYEDLDELQKEPQPLVFVIELLQVDAPSDYQRETWNLSNHEKMKAVPVLHGEGNRLFKLGRYEEASSKYQEAIICLRNLQTKEKPWEVQWLKLEKMINTLILNYCQCLLKKEEYYEVLEHTSDILRHHPGIVKAYYVRARAHAEVWNEAEAKADLQKVLELEPSMQKAVRRELRLLENRMAEKQEEERLRCRNMLSQGATQPPAEPPTEPPAQSSTEPPAEPPTAPSAELSAGPPAEPATEPPPSPGHSLQH

SEQ ID NO: 314 - protein, 1676 aa, Homo sapiens; identical to SEQ ID NO: 192
  C5B isoform 1 <Accession No.: NP_001726.2>

SEQ ID NO: 315 - protein, 1682 aa, Homo sapiens; identical to SEQ ID NO: 193
  C5B, isoform 2 <Accession No.: NP_001304092.1>

SEQ ID NO: 316 - protein, 902 aa, Homo sapiens; identical to SEQ ID NO: 194
  C5B, isoform 3 <Accession No.: NP_001304093.1>

SEQ ID NO: 317 - protein, 934 aa, Homo sapiens
  C6 <Accession No.: NP_001108603.2>
MARRSVLYFILLNALINKGQACFCDHYAWTQWTSCSKTCNSGTQSRHRQIVVDKYYQENFCEQICSKQETRECNWQRCPINCLLGDFGPWSDCDPCIEKQSKVRSVLRPSQFGGQPCTAPLVAFQPCIPSKLCKIEEADCKNKFRCDSGRCIARKLECNGENDCGDNSDERDCGRTKAVCTRKYNPIPSVQLMGNGFHFLAGEPRGEVLDNSFTGGICKTVKSSRTSNPYRVPANLENVGFEVQTAEDDLKTDFYKDLTSLGHNENQQGSFSSQGGSSFSVPIFYSSKRSENINHNSAFKQAIQASHKKDSSFIRIHKVMKVLNFTTKAKDLHLSDVFLKALNHLPLEYNSALYSRIFDDFGTHYFTSGSLGGVYDLLYQFSSEELKNSGLTEEEAKHCVRIETKKRVLFAKKTKVEHRCTTNKLSEKHEGSFIQGAEKSISLIRGGRSEYGAALAWEKGSSGLEEKTFSEWLESVKENPAVIDFELAPIVDLVRNIPCAVTKRNNLRKALQEYAAKFDPCQCAPCPNNGRPTLSGTECLCVCQSGTYGENCEKQSPDYKSNAVDGQWGCWSSWSTCDATYKRSRTRECNNPAPQRGGKRCEGEKRQEEDCTFSIMENNGQPCINDDEEMKEVDLPEIEADSGCPQPVPPENGFIRNEKQLYLVGEDVEISCLTGFETVGYQYFRCLPDGTWRQGDVECQRTECIKPVVQEVLTITPFQRLYRIGESIELTCPKGFVVAGPSRYTCQGNSWTPPISNSLTCEKDTLTKLKGHCQLGQKQSGSECICMSPEEDCSHHSEDLCVFDTDSNDYFTSPACKFLAEKCLNNQQLHFLHIGSCQDGRQLEWGLERTRLSSNSTKKESCGYDTCYDWEKCSASTSKCVCLLPPQCFKGGNQLYCVKMGSSTSEKTLNICEVGTIRCANRKMEILHPGKCLA

SEQ ID NO: 318 - protein, 843 aa, Homo sapiens
  C7 <Accession No.: NP_000578.2>
MKVISLFILVGFIGEFQSFSSASSPVNCQWDFYAPWSECNGCTKTQTRRRSVAVYGQYGGQPCVGNAFETQSCEPTRGCPTEEGCGERFRCFSGQCISKSLVCNGDSDCDEDSADEDRCEDSERRPSCDIDKPPPNIELTGNGYNELTGQFRNRVINTKSFGGQCRKVFSGDGKDFYRLSGNVLSYTFQVKINNDFNYEFYNSTWSYVKHTSTEHTSSSRKRSFFRSSSSSSRSYTSHTNEIHKGKSYQLLVVENTVEVAQFINNNPEFLQLAEPFWKELSHLPSLYDYSAYRRLIDQYGTHYLQSGSLGGEYRVLFYVDSEKLKQNDFNSVEEKKCKSSGWHFVVKFSSHGCKELENALKAASGTQNNVLRGEPFIRGGGAGFISGLSYLELDNPAGNKRRYSAWAESVTNLPQVIKQKLTPLYELVKEVPCASVKKLYLKWALEEYLDEFDPCHCRPCQNGGLATVEGTHCLCHCKPYTFGAACEQGVLVGNQAGGVDGGWSCWSSWSPCVQGKKTRSRECNNPPPSGGGRSCVGETTESTQCEDEELEHLRLLEPHCFPLSLVPTEFCPSPPALKDGFVQDEGTMFPVGKNVVYTCNEGYSLIGNPVARCGEDLRWLVGEMHCQKIACVLPVLMDGIQSHPQKPFYTVGEKVTVSCSGGMSLEGPSAFLCGSSLKWSPEMKNARCVQKENPLTQAVPKCQRWEKLQNSRCVCKMPYECGPSLDVCAQDERSKRILPLTVCKMHVLHCQGRNYTLTGRDSCTLPASAEKACGACPLWGKCDAESSKCVCREASECEEEGFSICVEVNGKEQTMSECEAGALRCRGQSISVTSIRPCAAETQ

SEQ ID NO: 319 - protein, 584 aa, Homo sapiens
  C8 ALPHA SUBUNIT <Accession No.: NP_000553.1>
MFAVVFFILSLMTCQPGVTAQEKVNQRVRRAATPAAVTCQLSNWSEWTDCFPCQDKKYRHRSLLQPNKFGGTICSGDIWDQASCSSSTTCVRQAQCGQDFQCKETGRCLKRHLVCNGDQDCLDGSDEDDCEDVRAIDEDCSQYEPIPGSQKAALGYNILTQEDAQSVYDASYYGGQCETVYNGEWRELRYDSTCERLYYGDDEKYFRKPYNFLKYHFEALADTGISSEFYDNANDLLSKVKKDKSDSFGVTIGIGPAGSPLLVGVGVSHSQDTSFLNELNKYNEKKFIFTRIFTKVQTAHFKMRKDDIMLDEGMLQSLMELPDQYNYGMYAKFINDYGTHYITSGSMGGIYEYILVIDKAKMESLGITSRDITTCFGGSLGIQYEDKINVGGGLSGDHCKKFGGGKTERARKAMAVEDIISRVRGGSSGWSGGLAQNRSTITYRSWGRSLKYNPVVIDFEMQPIHEVLRHTSLGPLEAKRQNLRRALDQYLMEFNACRCGPCFNNGVPILEGTSCRCQCRLGSLGAACEQTQTEGAKADGSWSCWSSWSVCRAGIQERRRECDNPAPQNGGASCPGRKVQTQAC

SEQ ID NO: 320 - protein, 591 aa, Homo sapiens
  C8 BETA SUBUNIT <Accession No.: AAA51862.1>
MKNSRTWAWRAPVELFLLCAALGCLSLPGSRGERPHSFGSNAVNKSFAKSRQMRSVDVTLMPIDCELSSWSSWTTCDPCQKKRYRYAYLLQPSQFHGEPCNFSDKEVEDCVTNRPCGSQVRCEGFVCAQTGRCVNRRLLCNGDNDCGDQSDEANCRRIYKKCQHEMDQYWGIGSLASGINLFTNSFEGPVLDHRYYAGGCSPHYILNTRFRKPYNVESYTPQTQGKYEFILKEYESYSDFERNVTEKMASKSGFSFGFKIPGIFELGISSQSDRGKHYIRRTKRFSHTKSVFLHARSDLEVAHYKLKPRSLMLHYEFLQRVKRLPLEYSYGEYRDLFRDFGTHYITEAVLGGIYEYTLVMNKEAMERGDYTLNNVHACAKNDFKIGGAIEEVYVSLGVSVGKCRGILNEIKDRNKRDTMVEDLVVLVRGGASEHITTLAYQELPTADLMQEWGDAVQYNPAIIKVKVEPLYELVTATDFAYSSTVRQNMKQALEEFQKEVSSCHCAPCQGNGVPVLKGSRCDCICPVGSQGLACEVSYRKNTPIDGKWNCWSNWSSCSGRRKTRQRQCNNPPPQNGGSPCSGPASETLDCS

SEQ ID NO: 321 - protein, 202 aa, Homo sapiens
  C8 GAMMA SUBUNIT <Accession No.: AAA51888.1>
MLPPGTATLLTLLLAAGSLGQKPQRPRRPASPISTIQPKANFDAQQFAGTWLLVAVGSACRFLQEQGHRAEATTLHVAPQGTAMAVSTFRKLDGICWQVRQLYGDTGVLGRFLLQARGARGAVHVVVAETDYQSFAVLYLERAGQLSVKLYARSLPVSDSVLSGFEQRVQEAHLTEDQIFYFPKYGFCEAADQFHVLDEVRR

What is claimed is:

1. A method of subretinal administration without vitrectomy for treating a pathology of the eye, comprising administering to the subretinal space in the eye of a human subject in need of treatment a recombinant viral vector comprising a nucleotide sequence encoding a therapeutic product such that the therapeutic product is expressed and results in treatment of the pathology of the eye, wherein the method does not comprise performing a vitrectomy on the eye of said human patient.

2. The method of claim 1, wherein the administering step comprises administering to the subretinal space in the eye of said human subject the recombinant viral vector therapeutic product via the suprachoroidal space in the eye of said human subject.

3. The method of claim 2, wherein the administering step is by the use of a subretinal drug delivery device comprising a catheter that can be inserted and tunneled through the suprachoroidal space toward the posterior pole, where a small needle injects into the subretinal space.

4. The method of claim 3, wherein the administering step comprises inserting and tunneling the catheter of the subretinal drug delivery device through the suprachoroidal space.

5. A method of suprachoroidal administration for treating a pathology of the eye, comprising administering to the suprachoroidal space in the eye of a human subject in need of treatment a recombinant viral vector comprising a nucleotide sequence encoding a therapeutic product such that the therapeutic product is expressed and results in treatment of the pathology of the eye.

6. The method of claim 5, wherein the administering step is by injecting the recombinant viral vector into the suprachoroidal space using a suprachoroidal drug delivery device.

7. The method of claim 5 or 6, wherein the suprachoroidal drug delivery device is a microinjector.

8. A method of administration to the outer space of the sclera for treating a pathology of the eye, comprising administering to the outer surface of the sclera in the eye of a human subject in need of treatment a recombinant viral vector comprising a nucleotide sequence encoding a therapeutic product such that the therapeutic product is expressed and results in treatment of the pathology of the eye.

9. The method of claim 8, wherein the administering step is by the use of a juxtascleral drug delivery device that comprises a cannula whose tip can be inserted and kept in direct apposition to the scleral surface.

10. The method of claim 9, wherein the administering step comprises inserting and keeping the tip of the cannula in direct apposition to the scleral surface.

11. The method of any one of claims 1-10, wherein the therapeutic product is not an anti-human vascular endothelial growth factor (hVEGF) antibody.

12. The method of any one of claims 1-11, wherein the pathology of the eye is not associated with neovascular age-related macular degeneration (nAMD).

13. A method of subretinal administration accompanied by vitrectomy for treating a pathology of the eye, comprising administering to the subretinal space in the eye of a human subject in need of treatment a recombinant viral vector comprising a nucleotide sequence encoding a therapeutic product such that the therapeutic product is expressed and results in treatment of the pathology of the eye, wherein the method comprises performing a vitrectomy on the eye of said human patient, and wherein the therapeutic product is not anti-human vascular endothelial growth factor (hVEGF) antibody.

14. The method of claim 13, wherein the vitrectomy is a partial vitrectomy.

15. A method of subretinal administration for treating a pathology of the eye, comprising administering to the subretinal space peripheral to the optic disc, fovea and macula located in the back of the eye of a human subject in need of treatment a recombinant viral vector comprising a nucleotide sequence encoding a therapeutic product such that the therapeutic product is expressed and results in treatment of the pathology of the eye, wherein the method does not comprise performing a vitrectomy on the eye of said human patient.

16. The method of claim 15, wherein the administering step is by transvitreal injection.

17. The method of claim 16, wherein the transvitreal injection comprises inserting a sharp needle into the sclera via the superior or inferior side of the eye and passing the sharp needle all the way through the vitreous to inject the recombinant viral vector to the subretinal space on the other side.

18. The method of claim 16, wherein the transvitreal injection comprises inserting a trochar into the sclera and inserting a cannula through the trochar and through the vitreous to inject the recombinant viral vector to the subretinal space on the other side.

19. The method of any one of claims 15-18, wherein the therapeutic product is an anti-hVEGF antibody.

20. The method of claim 19, wherein the anti-hVEGF antibody is an anti-hVEGF antigen-binding fragment.

21. The method of claim 20, wherein the anti-hVEGF antigen-binding fragment is a Fab, F(ab′)₂, or single chain variable fragment (scFv).

22. The method of any one of claims 19-21, wherein the anti-hVEGF antibody comprises a heavy chain comprising the amino acid sequence of SEQ ID NO:2 or SEQ ID NO:4, and a light chain comprising the amino acid sequence of SEQ ID NO:1, or SEQ ID NO:3.

23. The method of any one of claims 19-21, wherein the anti-hVEGF antibody comprises light chain CDRs 1-3 of SEQ ID NOs:14-16 and heavy chain CDRs 1-3 of SEQ ID NOs:17-19 or SEQ ID NOs:20, 18, and 21.

24. The method of any one of claims 19-23, wherein the pathology of the eye is associated with nAMD, dry age-related macular degeneration (dry AMD), retinal vein occlusion (RVO), diabetic macular edema (DME), or diabetic retinopathy (DR).

25. The method of any one of claims 19-23, wherein the pathology of the eye is associated with nAMD.

26. The method of any one of claims 1-11 and 13-18, wherein:
(1) the pathology of the eye is associated with Batten-CLN1 and the therapeutic product is Palmitoyl-Protein Thioesterase 1 (PPT1);
(2) the pathology of the eye is associated with Batten-CLN2 and the therapeutic product is Tripeptidyl-Peptidase 1 (TPP1);
(3) the pathology of the eye is associated with Batten-CLN3 and the therapeutic product is Battenin (CLN3);
(4) the pathology of the eye is associated with Batten-CLN6 and the therapeutic product is CLN6 Transmembrane ER Protein (CLN6);
(5) the pathology of the eye is associated with Batten-CLN7 and the therapeutic product is Major Facilitator Superfamily Domain Containing 8 (MFSD8);
(6) the pathology of the eye is associated with Usher's-Type 1 and the therapeutic product is Myosin VIIA (MYO7A);
(7) the pathology of the eye is associated with Usher's-Type 1 and the therapeutic product is Cadherin Related 23 (CDH23);
(8) the pathology of the eye is associated with Usher's-Type 2 and the therapeutic product is Protocadherin Related 15 (PCDH15);
(9) the pathology of the eye is associated with Usher's-Type 2 and the therapeutic product is Usherin (USH2A);
(10) the pathology of the eye is associated with Usher's-Type 3 and the therapeutic product is Clarin 1 (CLRN1);
(11) the pathology of the eye is associated with Stargardt's and the therapeutic product is ATP Binding Cassette Subfamily A Member 4 (ABCA4);
(12) the pathology of the eye is associated with Stargardt's and the therapeutic product is ELOVL Fatty Acid Elongase 4 (ELOVL4);
(13) the pathology of the eye is associated with uveitis and the therapeutic product is an anti-Interleukin 6 (IL6) monoclonal antibody;
(14) the pathology of the eye is associated with uveitis and the therapeutic product is an anti-TNF-alpha (TNF) monoclonal antibody;
(15) the pathology of the eye is associated with diabetic macular edema (DME) and the therapeutic product is an anti-IL6 monoclonal antibody;
(16) the pathology of the eye is associated with red-green color blindness and the therapeutic product is L opsin (OPN1LW);
(17) the pathology of the eye is associated with red-green color blindness and the therapeutic product is M opsin (OPN1MW);
(18) the pathology of the eye is associated with blue cone monochromacy and the therapeutic product is M opsin (OPN1MW);
(19) the pathology of the eye is associated with Leber congenital amaurosis-1 (LCA 1) and the therapeutic product is Guanylate Cyclase 2D, Retinal (GUCY2D);
(20) the pathology of the eye is associated with Leber congenital amaurosis-2 (LCA 2) and the therapeutic product is Retinoid Isomerohydrolase RPE65 (RPE65);
(21) the pathology of the eye is associated with LCA 3 and the therapeutic product is Spermatogenesis Associated 7 (SPATA7);
(22) the pathology of the eye is associated with Leber congenital amaurosis-4 (LCA 4) and the therapeutic product is Aryl Hydrocarbon Receptor Interacting Protein Like 1 (AIPL1);
(23) the pathology of the eye is associated with Leber congenital amaurosis-5 (LCA 5) and the therapeutic product is Lebercilin (LCA5);
(24) the pathology of the eye is associated with Leber congenital amaurosis-6 (LCA 6) and the therapeutic product is RPGR Interacting Protein 1 (RPGRIP1);
(25) the pathology of the eye is associated with Leber congenital amaurosis-7 (LCA 7) and the therapeutic product is Cone-Rod Homeobox (CRX);
(26) the pathology of the eye is associated with Leber congenital amaurosis-8 (LCA 8) and the therapeutic product is Crumbs Cell Polarity Complex Component 1 (CRB1);
(27) the pathology of the eye is associated with Leber congenital amaurosis-9 (LCA 9) and the therapeutic product is Nicotinamide Nucleotide Adenylyltransferase 1 (NMNAT1);
(28) the pathology of the eye is associated with Leber congenital amaurosis-10 (LCA 10) and the therapeutic product is Centrosomal Protein 290 (CEP290);
(29) the pathology of the eye is associated with Leber congenital amaurosis-11 (LCA 11) and the therapeutic product is Inosine Monophosphate Dehydrogenase 1 (IMPDH1);
(30) the pathology of the eye is associated with Leber congenital amaurosis-12 (LCA 12) and the therapeutic product is Retinal Degeneration 3, GUCY2D regulator (RD3);
(31) the pathology of the eye is associated with Leber congenital amaurosis-13 (LCA 13) and the therapeutic product is Retinol Dehydrogenase 12 (RDH12);
(32) the pathology of the eye is associated with Leber congenital amaurosis-14 (LCA 14) and the therapeutic product is Lecithin Retinol Acyltransferase (LRAT);
(33) the pathology of the eye is associated with Leber congenital amaurosis-15 (LCA 15) and the therapeutic product is Tubby Like Protein 1 (TULP1);
(34) the pathology of the eye is associated with Leber congenital amaurosis-16 (LCA 16) and the therapeutic product is Potassium Voltage-Gated Channel Subfamily J Member 13 (KCNJ13);
(35) the pathology of the eye is associated with Leber's hereditary optic neuropathy (LHON) and the therapeutic product is Mitochondrially Encoded NADH Dehydrogenase 1 (MT-ND1);
(36) the pathology of the eye is associated with LHON and the therapeutic product is Mitochondrially Encoded NADH Dehydrogenase 4 (MT-ND4);
(37) the pathology of the eye is associated with LHON and the therapeutic product is Mitochondrially Encoded NADH Dehydrogenase 6 (MT-ND6);
(38) the pathology of the eye is associated with neuromyelitis optica (NMO) and the therapeutic product is an anti-complement C5 monoclonal antibody;
(39) the pathology of the eye is associated with NMO and the therapeutic product is an anti-IL6 monoclonal antibody;
(40) the pathology of the eye is associated with uveitis and the therapeutic product is an anti-complement C5 monoclonal antibody;
(41) the pathology of the eye is associated with uveitis and the therapeutic product is Angiotensin I Converting Enzyme (ACE);
(42) the pathology of the eye is associated with uveitis and the therapeutic product is Interleukin 10 (IL10);
(43) the pathology of the eye is associated with uveitis and the therapeutic product is an anti-TNF monoclonal antibody;
(44) the pathology of the eye is associated with choroideremia and the therapeutic product is Rab Escort Protein 1 (CHM);
(45) the pathology of the eye is associated with X-linked retinoschisis (XLRS) and the therapeutic product is Retinoschisin (RS1);
(46) the pathology of the eye is associated with Bardet-Biedl syndrome 1 and the therapeutic product is Bardet-Biedl Syndrome 1 (BBS1);
(47) the pathology of the eye is associated with Bardet-Biedl syndrome 2 and the therapeutic product is Bardet-Biedl Syndrome 2 (BBS2);
(48) the pathology of the eye is associated with Bardet-Biedl syndrome 3 and the therapeutic product is ADP Ribosylation Factor Like GTPase 6 (ARL6);
(49) the pathology of the eye is associated with Bardet-Biedl syndrome 4 and the therapeutic product is Bardet-Biedl Syndrome 4 (BBS4);
(50) the pathology of the eye is associated with Bardet-Biedl syndrome 5 and the therapeutic product is Bardet-Biedl Syndrome 5 (BBS5);
(51) the pathology of the eye is associated with Bardet-Biedl syndrome 6 and the therapeutic product is McKusick-Kaufman Syndrome (MKKS);
(52) the pathology of the eye is associated with Bardet-Biedl syndrome 7 and the therapeutic product is Bardet-Biedl Syndrome 7 (BBS7);
(53) the pathology of the eye is associated with Bardet-Biedl syndrome 8 and the therapeutic product is Tetratricopeptide Repeat Domain 8 (TTC8);
(54) the pathology of the eye is associated with Bardet-Biedl syndrome 9 and the therapeutic product is Bardet-Biedl Syndrome 9 (BBS9);
(55) the pathology of the eye is associated with Bardet-Biedl syndrome 10 and the therapeutic product is Bardet-Biedl Syndrome 10 (BBS10);
(56) the pathology of the eye is associated with Bardet-Biedl syndrome 11 and the therapeutic product is Tripartite Motif Containing 32 (TRIM32);
(57) the pathology of the eye is associated with Bardet-Biedl syndrome 12 and the therapeutic product is Bardet-Biedl Syndrome 12 (BBS12);
(58) the pathology of the eye is associated with Bardet-Biedl syndrome 13 and the therapeutic product is MKS Transition Zone Complex Subunit 1 (MKS1);
(59) the pathology of the eye is associated with Bardet-Biedl syndrome 14 and the therapeutic product is Centrosomal Protein 290 (CEP290);
(60) the pathology of the eye is associated with Bardet-Biedl syndrome 15 and the therapeutic product is WD Repeat Containing Planar Cell Polarity Effector (WDPCP);
(61) the pathology of the eye is associated with Bardet-Biedl syndrome 16 and the therapeutic product is Serologically Defined Colon Cancer Antigen 8 (SDCCAG8);
(62) the pathology of the eye is associated with Bardet-Biedl syndrome 17 and the therapeutic product is Leucine Zipper Transcription Factor Like 1 (LZTFL1);
(63) the pathology of the eye is associated with Bardet-Biedl syndrome 18 and the therapeutic product is BBSome Interacting Protein 1 (BBIP1);
(64) the pathology of the eye is associated with Bardet-Biedl syndrome 19 and the therapeutic product is Intraflagellar Transport 27 (IFT27);
(65) the pathology of the eye is associated with cone dystrophy and the therapeutic product is Guanylate Cyclase Activator 1A (GUCA1A);
(66) the pathology of the eye is associated with optic atrophy and the therapeutic product is OPA1 Mitochondrial Dynamin Like GTPase (OPA1);
(67) the pathology of the eye is associated with retinitis pigmentosa 1 and the therapeutic product is RP1 Axonemal Microtubule Associated (RP1);
(68) the pathology of the eye is associated with retinitis pigmentosa 2 and the therapeutic product is RP2 Activator of ARL3 GTPase (RP2);
(69) the pathology of the eye is associated with retinitis pigmentosa 7 and the therapeutic product is Peripherin 2 (PRPH2);
(70) the pathology of the eye is associated with retinitis pigmentosa 11 and the therapeutic product is Pre-mRNA Processing Factor 31(PRPF31);
(71) the pathology of the eye is associated with retinitis pigmentosa 12 and the therapeutic product is Crumbs Cell Polarity Complex Component 1 (CRB1);
(72) the pathology of the eye is associated with retinitis pigmentosa 13 and the therapeutic product is Pre-mRNA Processing Factor 8 (PRPF8);
(73) the pathology of the eye is associated with retinitis pigmentosa 25 and the therapeutic product is Eyes Shut Homolog (EYS);
(74) the pathology of the eye is associated with retinitis pigmentosa 28 and the therapeutic product is FAM161 Centrosomal Protein A (FAM161A);
(75) the pathology of the eye is associated with retinitis pigmentosa 37 and the therapeutic product is Nuclear Receptor Subfamily 2 Group E Member 3 (NR2E3);
(76) the pathology of the eye is associated with retinitis pigmentosa 38 and the therapeutic product is MER Proto-Oncogene, Tyrosine Kinase (MERTK);
(77) the pathology of the eye is associated with retinitis pigmentosa 40 and the therapeutic product is Phosphodiesterase 6B (PDE6B);
(78) the pathology of the eye is associated with retinitis pigmentosa 41 and the therapeutic product is Prominin 1 (PROM1);
(79) the pathology of the eye is associated with retinitis pigmentosa 43 and the therapeutic product is Phosphodiesterase 6A (PDE6A);
(80) the pathology of the eye is associated with retinitis pigmentosa 56 and the therapeutic product is Interphotoreceptor Matrix Proteoglycan 2 (IMPG2);
(81) the pathology of the eye is associated with petinitis pigmentosa 62 and the therapeutic product is Male Germ Cell Associated Kinase (MAK);
(82) the pathology of the eye is associated with retinitis pigmentosa 80 and the therapeutic product is Intraflagellar Transport 140 (IFT140);
(83) the pathology of the eye is associated with dry AMD and the therapeutic product is an anti-complement C5 monoclonal antibody;
(84) the pathology of the eye is associated with dry AMD and the therapeutic product is an anti-membrane attack complex (MAC) monoclonal antibody;
(85) the pathology of the eye is associated with dry AMD and the therapeutic product is HtrA Serine Peptidase 1 (HTRA1);
(86) the pathology of the eye is associated with Best disease and the therapeutic product is Bestrophin 1 (BEST1);
(87) the pathology of the eye is associated with dry AMD and the therapeutic product is a complement factor B anti sense oligonucleotide;
(88) the pathology of the eye is associated with dry AMD and the therapeutic product is an anti-beta-amyloid monoclonal antibody;
(89) the pathology of the eye is associated with dry AMD and the therapeutic product is CD59 glycoprotein (CD59);
(90) the pathology of the eye is associated with dry AMD and the therapeutic product is Channelrhodopsin-1 (ChR1);
(91) the pathology of the eye is associated with dry AMD and the therapeutic product is Channelrhodopsin-2 (ChR2), the light-sensitive protein discovered in Chlamydomonas reinhardtii;
(92) the pathology of the eye is associated with dry AMD and the therapeutic product is an anti-complement factor C5a aptamer;
(93) the pathology of the eye is associated with dry AMD and the therapeutic product is anti-complement factor D monoclonal antibody;
(94) the pathology of the eye is associated with age-related retinal ganglion cell (RGC) degeneration and the therapeutic product is DnaJ heat shock protein family (Hsp40) member C3 (DNAJC3);
(95) the pathology of the eye is associated with blue cone monochromacy (BCM) and the therapeutic product is L opsin (OPN1LW);
(96) the pathology of the eye is associated with glaucoma and the therapeutic product is beta-2 adrenoceptor siRNA;
(97) the pathology of the eye is associated with glaucoma and the therapeutic product is Caspase-2 (CASP2);
(98) the pathology of the eye is associated with glaucoma and the therapeutic product is Insulin Receptor Substrate 1 (IRS1);
(99) the pathology of the eye is associated with glaucoma and the therapeutic product is HIF-1 Responsive Protein RTP801 (RTP801);
(100) the pathology of the eye is associated with glaucoma and the therapeutic product is Transforming Growth Factor Beta 2 (TGFB2);
(101) the pathology of the eye is associated with glaucoma and the therapeutic product is Brain Derived Neurotrophic Factor (BDNF);
(102) the pathology of the eye is associated with glaucoma and the therapeutic product is Ciliary Neurotrophic Factor (CNTF);
(103) the pathology of the eye is associated with glaucoma and the therapeutic product is Prostaglandin-Endoperoxide Synthase 2 (PTGS2);
(104) the pathology of the eye is associated with glaucoma and the therapeutic product is Prostaglandin F Receptor (PTGFR);
(105) the pathology of the eye is associated with glaucoma and the therapeutic product is a hyaluronidase;
(106) the pathology of the eye is associated with glaucoma and the therapeutic product is Pigment Epithelium-Derived Factor (PEDF);
(107) the pathology of the eye is associated with glaucoma and the therapeutic product is Vascular Endothelial Growth Factor (VEGF);
(108) the pathology of the eye is associated with glaucoma and the therapeutic product is Placental Growth Factor (PGF);
(109) the pathology of the eye is associated with glaucoma and the therapeutic product is Myocilin (MYOC);
(110) the pathology of the eye is associated with NMO and the therapeutic product is an anti-complement C5 monoclonal antibody;
(111) the pathology of the eye is associated with NMO and the therapeutic product is C-C Motif Chemokine Receptor 5 (CCR5) siRNA;
(112) the pathology of the eye is associated with NMO and the therapeutic product is an anti-CD19 monoclonal antibody;
(113) the pathology of the eye is associated with retinitis pigmentosa that is associated with rhodopsin mutations and the therapeutic product is Channelrhodopsin-1 (ChR1);
(114) the pathology of the eye is associated with retinitis pigmentosa that is associated with rhodopsin mutations and the therapeutic product is Channelrhodopsin-2 (ChR2);
(115) the pathology of the eye is associated with retinitis pigmentosa and the therapeutic product is Ciliary Neurotrophic Factor (CNTF);
(116) the pathology of the eye is associated with autosomal recessive retinitis pigmentosa and the therapeutic product is Crumbs Cell Polarity Complex Component 1 (CRB1);
(117) the pathology of the eye is associated with autosomal recessive retinitis pigmentosa and the therapeutic product is Crumbs Cell Polarity Complex Component 2 (CRB2);
(118) the pathology of the eye is associated with retinitis pigmentosa and the therapeutic product is Histone Deacetylase 4 (HDAC4);
(119) the pathology of the eye is associated with retinitis pigmentosa and the therapeutic product is Rhodopsin (RHO);
(120) the pathology of the eye is associated with retinitis pigmentosa and the therapeutic product is Nerve Growth Factor (NGF);
(121) the pathology of the eye is associated with retinitis pigmentosa and the therapeutic product is Nuclear Factor, Erythroid 2 Like 2 (NRF2);
(122) the pathology of the eye is associated with retinitis pigmentosa and the therapeutic product is Pigment Epithelium-Derived Factor (PEDF);
(123) the pathology of the eye is associated with retinitis pigmentosa and the therapeutic product is Glutathione S-Transferase PI 1 (GSTP1);
(124) the pathology of the eye is associated with retinitis pigmentosa and the therapeutic product is Rod-Derived Cone Viability Factor (RDCVF);
(125) the pathology of the eye is associated with retinitis pigmentosa and the therapeutic product is Rhodopsin (RHO);
(126) the pathology of the eye is associated with retinitis pigmentosa and the therapeutic product is Retinaldehyde Binding Protein 1 (RLBP1);
(127) the pathology of the eye is associated with Stargardt's disease and the therapeutic product is an anti-complement C5 aptamer;
(128) the pathology of the eye is associated with uveitis and the therapeutic product is Double Homeobox 4 (DUX4);
(129) the pathology of the eye is associated with uveitis and the therapeutic product is NLR Family Pyrin Domain Containing 3 (NLRP3);
(130) the pathology of the eye is associated with uveitis and the therapeutic product is Spleen Associated Tyrosine Kinase (SYK);
(131) the pathology of the eye is associated with uveitis and the therapeutic product is Adrenocorticotropic Hormone (ACTH);
(132) the pathology of the eye is associated with uveitis and the therapeutic product is Caspase 1 (CASP1);
(133) the pathology of the eye is associated with uveitis and the therapeutic product is anti-CD59 monoclonal antibody;
(134) the pathology of the eye is associated with uveitis and the therapeutic product is an anti-complement C5 aptamer;
(135) the pathology of the eye is associated with corneal neovascularization and the therapeutic product is Insulin Receptor Substrate 1 (IRS1);
(136) the pathology of the eye is associated with corneal neovascularization and the therapeutic product is NOTCH Regulated Ankyrin Repeat Protein (NRARP);
(137) the pathology of the eye is associated with diabetic retinopathy and the therapeutic product is NOTCH Regulated Ankyrin Repeat Protein (NRARP);
(138) the pathology of the eye is associated with diabetic retinopathy and the therapeutic product is Alpha-2-Antiplasmin (A2AP);
(139) the pathology of the eye is associated with diabetic retinopathy and the therapeutic product is Plasminogen (PLG);
(140) the pathology of the eye is associated with diabetic retinopathy and the therapeutic product is a growth hormone;
(141) the pathology of the eye is associated with diabetic retinopathy and the therapeutic product is Insulin Like Growth Factor 1 (IGF1);
(142) the pathology of the eye is associated with diabetic retinopathy and the therapeutic product is Interleukin 1 Beta (IL1B).
(143) the pathology of the eye is associated with diabetic retinopathy and the therapeutic product is Angiotensin I Converting Enzyme 2 (ACE2);
(144) the pathology of the eye is associated with diabetic retinopathy and the therapeutic product is IRS1;
(145) the pathology of the eye is associated with diabetic retinopathy and the therapeutic product is an anti-integrin oligopeptide;
(146) the pathology of the eye is associated with diabetic retinopathy and the therapeutic product is an anti-Placental Growth Factor (PGF) monoclonal antibody;
(147) the pathology of the eye is associated with Graves' ophthalmopathy and the therapeutic product is an anti-CD40 monoclonal antibody;
(148) the pathology of the eye is associated with Graves' ophthalmopathy and the therapeutic product is an anti-Insulin-Like Growth Factor 1 Receptor (IGF1R) monoclonal antibody;
(149) the pathology of the eye is associated with Graves' ophthalmopathy and the therapeutic product is an anti-Insulin-Like Growth Factor 2 Receptor (IGF2R) monoclonal antibody;
(150) the pathology of the eye is associated with DME and the therapeutic product is an anti-integrin oligopeptide;
(151) the pathology of the eye is associated with DME and the therapeutic product is an anti-Placental Growth Factor (PGF) monoclonal antibody;
(152) the pathology of the eye is associated with DME and the therapeutic product is RTP801 siRNA;
(153) the pathology of the eye is associated with multiple sclerosis (MS)-associated vision loss and the therapeutic product is ND1;
(154) the pathology of the eye is associated with myopia and the therapeutic product is Matrix Metalloproteinase 2 (MMP2) RNAi;
(155) the pathology of the eye is associated with X-linked recessive ocular albinism and the therapeutic product is G-Protein Coupled Receptor 143 (GPR143);
(156) the pathology of the eye is associated with oculocutaneous albinism type 1 and the therapeutic product is Tyrosinase (TYR);
(157) the pathology of the eye is associated with optic neuritis and the therapeutic product is Caspase 2 (CASP2);
(158) the pathology of the eye is associated with optic neuritis and the therapeutic product is an anti-Leucine Rich Repeat And Ig Domain Containing Protein 1 (LINGO1) monoclonal antibody; or
(159) the pathology of the eye is associated with polypoidal choroidal vasculopathy and the therapeutic product is an anti-complement C5 aptamer.

27. The method of any one of claims 1-11 and 15-18, wherein: (1) the pathology of the eye is associated with X-linked retinitis pigmentosa (XLRP) and the therapeutic product is Retinitis Pigmentosa GTPase Regulator (RPGR);
(2) the pathology of the eye is associated with achromatopsia (ACHM) and the therapeutic product is Cyclic Nucleotide Gated Channel Beta 3 (CNGB3);
(3) the pathology of the eye is associated with achromatopsia and the therapeutic product is Cyclic Nucleotide Gated Channel Alpha 3 (CNGA3); or
(4) the pathology of the eye is associated with biallelic RPE65 mutation-associated retinal dystrophy and the therapeutic product is Retinoid Isomerohydrolase RPE65 (RPE65).

28. The method of any one of claims 1-11 and 13-18, wherein:
(1) the pathology of the eye is associated with Batten-CLN1 and the therapeutic product is Palmitoyl-Protein Thioesterase 1 (PPT1);
(2) the pathology of the eye is associated with Batten-CLN2 and the therapeutic product is Tripeptidyl-Peptidase 1 (TPP1);
(3) the pathology of the eye is associated with Batten-CLN3 and the therapeutic product is Battenin (CLN3);
(4) the pathology of the eye is associated with uveitis and the therapeutic product is an anti-Interleukin 6 (IL6) monoclonal antibody;
(5) the pathology of the eye is associated with uveitis and the therapeutic product is an anti-TNF-alpha (TNF) monoclonal antibody;
(6) the pathology of the eye is associated with diabetic macular edema (DME) and the therapeutic product is an anti-IL6 monoclonal antibody;
(7) the pathology of the eye is associated with red-green color blindness and the therapeutic product is L opsin (OPN1LW);
(8) the pathology of the eye is associated with red-green color blindness and the therapeutic product is M opsin (OPN1MW);
(9) the pathology of the eye is associated with blue cone monochromacy and the therapeutic product is M opsin (OPN1MW);
(10) the pathology of the eye is associated with Leber congenital amaurosis-1 (LCA 1) and the therapeutic product is Guanylate Cyclase 2D, Retinal (GUCY2D);
(11) the pathology of the eye is associated with Leber congenital amaurosis-2 (LCA 2) and the therapeutic product is Retinoid Isomerohydrolase RPE65 (RPE65);
(12) the pathology of the eye is associated with Leber congenital amaurosis-7 (LCA 7) and the therapeutic product is Cone-Rod Homeobox (CRX);
(13) the pathology of the eye is associated with Leber congenital amaurosis-11 (LCA 11) and the therapeutic product is Inosine Monophosphate Dehydrogenase 1 (IMPDH1);
(14) the pathology of the eye is associated with Leber congenital amaurosis-12 (LCA 12) and the therapeutic product is Retinal Degeneration 3, GUCY2D regulator (RD3);
(15) the pathology of the eye is associated with Leber congenital amaurosis-13 (LCA 13) and the therapeutic product is Retinol Dehydrogenase 12 (RDH12);
(16) the pathology of the eye is associated with Leber congenital amaurosis-15 (LCA 15) and the therapeutic product is Tubby Like Protein 1 (TULP1);
(17) the pathology of the eye is associated with Leber congenital amaurosis-16 (LCA 16) and the therapeutic product is Potassium Voltage-Gated Channel Subfamily J Member 13 (KCNJ13);
(18) the pathology of the eye is associated with Leber's hereditary optic neuropathy (LHON) and the therapeutic product is Mitochondrially Encoded NADH Dehydrogenase 1 (MT-ND1);
(19) the pathology of the eye is associated with LHON and the therapeutic product is Mitochondrially Encoded NADH Dehydrogenase 4 (MT-ND4);
(20) the pathology of the eye is associated with LHON and the therapeutic product is Mitochondrially Encoded NADH Dehydrogenase 6 (MT-ND6);
(21) the pathology of the eye is associated with neuromyelitis optica (NMO) and the therapeutic product is an anti-complement C5 monoclonal antibody;
(22) the pathology of the eye is associated with NMO and the therapeutic product is an anti-IL6 monoclonal antibody;
(23) the pathology of the eye is associated with uveitis and the therapeutic product is an anti-complement C5 monoclonal antibody;
(24) the pathology of the eye is associated with uveitis and the therapeutic product is Angiotensin I Converting Enzyme (ACE);
(25) the pathology of the eye is associated with uveitis and the therapeutic product is Interleukin 10 (IL10);
(26) the pathology of the eye is associated with uveitis and the therapeutic product is an anti-TNF monoclonal antibody;
(27) the pathology of the eye is associated with X-linked retinoschisis (XLRS) and the therapeutic product is Retinoschisin (RS1);
(28) the pathology of the eye is associated with Bardet-Biedl syndrome 1 and the therapeutic product is Bardet-Biedl Syndrome 1 (BBS1);
(29) the pathology of the eye is associated with Bardet-Biedl syndrome 3 and the therapeutic product is ADP Ribosylation Factor Like GTPase 6 (ARL6);
(30) the pathology of the eye is associated with Bardet-Biedl syndrome 5 and the therapeutic product is Bardet-Biedl Syndrome 5 (BBS5);
(31) the pathology of the eye is associated with Bardet-Biedl syndrome 6 and the therapeutic product is McKusick-Kaufman Syndrome (MKKS);
(32) the pathology of the eye is associated with Bardet-Biedl syndrome 10 and the therapeutic product is Bardet-Biedl Syndrome 10 (BBS10);
(33) the pathology of the eye is associated with Bardet-Biedl syndrome 11 and the therapeutic product is Tripartite Motif Containing 32 (TRIM32);
(34) the pathology of the eye is associated with Bardet-Biedl syndrome 13 and the therapeutic product is MKS Transition Zone Complex Subunit 1 (MKS1);
(35) the pathology of the eye is associated with Bardet-Biedl syndrome 18 and the therapeutic product is BBSome Interacting Protein 1 (BBIP1);
(36) the pathology of the eye is associated with Bardet-Biedl syndrome 19 and the therapeutic product is Intraflagellar Transport 27 (IFT27);
(37) the pathology of the eye is associated with cone dystrophy and the therapeutic product is Guanylate Cyclase Activator 1A (GUCA1A);
(38) the pathology of the eye is associated with retinitis pigmentosa 13 and the therapeutic product is Pre-mRNA Processing Factor 8 (PRPF8);
(39) the pathology of the eye is associated with retinitis pigmentosa 37 and the therapeutic product is Nuclear Receptor Subfamily 2 Group E Member 3 (NR2E3); or
(40) the pathology of the eye is associated with Best disease and the therapeutic product is Bestrophin 1 (BEST1).

29. The method of any one of claims 1-11 and 15-18, wherein:
(1) the pathology of the eye is associated with biallelic RPE65 mutation-associated retinal dystrophy and the therapeutic product is Retinoid Isomerohydrolase RPE65 (RPE65).

30. The method of any one of claims 1-11 and 13-18, wherein:
(1) the pathology of the eye is associated with Batten-CLN2 and the therapeutic product is Tripeptidyl-Peptidase 1 (TPP1);
(2) the pathology of the eye is associated with Usher's-Type 1 and the therapeutic product is Myosin VIIA (MYO7A);
(3) the pathology of the eye is associated with Usher's-Type 1 and the therapeutic product is Cadherin Related 23 (CDH23);
(4) the pathology of the eye is associated with Usher's-Type 2 and the therapeutic product is Protocadherin Related 15 (PCDH15);
(5) the pathology of the eye is associated with Usher's-Type 2 and the therapeutic product is Usherin (USH2A);
(6) the pathology of the eye is associated with Usher's-Type 3 and the therapeutic product is Clarin 1 (CLRN1);
(7) the pathology of the eye is associated with Stargardt's and the therapeutic product is ATP Binding Cassette Subfamily A Member 4 (ABCA4);
(8) the pathology of the eye is associated with Stargardt's and the therapeutic product is ELOVL Fatty Acid Elongase 4 (ELOVL4);
(9) the pathology of the eye is associated with red-green color blindness and the therapeutic product is L opsin (OPN1LW);
(10) the pathology of the eye is associated with red-green color blindness and the therapeutic product is M opsin (OPN1MW);
(11) the pathology of the eye is associated with blue cone monochromacy and the therapeutic product is M opsin (OPN1MW);
(12) the pathology of the eye is associated with Leber congenital amaurosis-1 (LCA 1) and the therapeutic product is Guanylate Cyclase 2D, Retinal (GUCY2D);
(13) the pathology of the eye is associated with Leber congenital amaurosis-2 (LCA 2) and the therapeutic product is Retinoid Isomerohydrolase RPE65 (RPE65);
(14) the pathology of the eye is associated with Leber congenital amaurosis-4 (LCA 4) and the therapeutic product is Aryl Hydrocarbon Receptor Interacting Protein Like 1 (AIPL1);
(15) the pathology of the eye is associated with Leber congenital amaurosis-7 (LCA 7) and the therapeutic product is Cone-Rod Homeobox (CRX);
(16) the pathology of the eye is associated with Leber congenital amaurosis-8 (LCA 8) and the therapeutic product is Crumbs Cell Polarity Complex Component 1 (CRB1);
(17) the pathology of the eye is associated with Leber congenital amaurosis-9 (LCA 9) and the therapeutic product is Nicotinamide Nucleotide Adenylyltransferase 1 (NMNAT1);
(18) the pathology of the eye is associated with Leber congenital amaurosis-10 (LCA 10) and the therapeutic product is Centrosomal Protein 290 (CEP290);
(19) the pathology of the eye is associated with Leber congenital amaurosis-11 (LCA 11) and the therapeutic product is Inosine Monophosphate Dehydrogenase 1 (IMPDH1);
(20) the pathology of the eye is associated with Leber congenital amaurosis-15 (LCA 15) and the therapeutic product is Tubby Like Protein 1 (TULP1);
(21) the pathology of the eye is associated with LHON and the therapeutic product is Mitochondrially Encoded NADH Dehydrogenase 4 (MT-ND4);
(22) the pathology of the eye is associated with LHON and the therapeutic product is Mitochondrially Encoded NADH Dehydrogenase 6 (MT-ND6);
(23) the pathology of the eye is associated with choroideremia and the therapeutic product is Rab Escort Protein 1 (CHM);
(24) the pathology of the eye is associated with X-linked retinoschisis (XLRS) and the therapeutic product is Retinoschisin (RS1);
(25) the pathology of the eye is associated with Bardet-Biedl syndrome 1 and the therapeutic product is Bardet-Biedl Syndrome 1 (BBS1);
(26) the pathology of the eye is associated with Bardet-Biedl syndrome 6 and the therapeutic product is McKusick-Kaufman Syndrome (MKKS);
(27) the pathology of the eye is associated with Bardet-Biedl syndrome 10 and the therapeutic product is Bardet-Biedl Syndrome 10 (BBS10);
(28) the pathology of the eye is associated with cone dystrophy and the therapeutic product is Guanylate Cyclase Activator 1A (GUCA1A);
(29) the pathology of the eye is associated with optic atrophy and the therapeutic product is OPA1 Mitochondrial Dynamin Like GTPase (OPA1);
(30) the pathology of the eye is associated with retinitis pigmentosa 1 and the therapeutic product is RP1 Axonemal Microtubule Associated (RP1);
(31) the pathology of the eye is associated with retinitis pigmentosa 2 and the therapeutic product is RP2 Activator of ARL3 GTPase (RP2);
(32) the pathology of the eye is associated with retinitis pigmentosa 7 and the therapeutic product is Peripherin 2 (PRPH2);
(33) the pathology of the eye is associated with retinitis pigmentosa 11 and the therapeutic product is Pre-mRNA Processing Factor 31(PRPF31);
(34) the pathology of the eye is associated with retinitis pigmentosa 13 and the therapeutic product is Pre-mRNA Processing Factor 8 (PRPF8);
(35) the pathology of the eye is associated with retinitis pigmentosa 37 and the therapeutic product is Nuclear Receptor Subfamily 2 Group E Member 3 (NR2E3);
(36) the pathology of the eye is associated with retinitis pigmentosa 38 and the therapeutic product is MER Proto-Oncogene, Tyrosine Kinase (MERTK);
(37) the pathology of the eye is associated with retinitis pigmentosa 40 and the therapeutic product is Phosphodiesterase 6B (PDE6B);
(38) the pathology of the eye is associated with retinitis pigmentosa 41 and the therapeutic product is Prominin 1 (PROM1);
(39) the pathology of the eye is associated with retinitis pigmentosa 56 and the therapeutic product is Interphotoreceptor Matrix Proteoglycan 2 (IMPG2);
(40) the pathology of the eye is associated with petinitis pigmentosa 62 and the therapeutic product is Male Germ Cell Associated Kinase (MAK);
(41) the pathology of the eye is associated with retinitis pigmentosa 80 and the therapeutic product is Intraflagellar Transport 140 (IFT140); or
(42) the pathology of the eye is associated with Best disease and the therapeutic product is Bestrophin 1 (BEST1).

31. The method of any one of claims 1-11 and 15-18, wherein:
(1) the pathology of the eye is associated with X-linked retinitis pigmentosa (XLRP) and the therapeutic product is Retinitis Pigmentosa GTPase Regulator (RPGR);
(2) the pathology of the eye is associated with achromatopsia and the therapeutic product is Cyclic Nucleotide Gated Channel Beta 3 (CNGB3); or
(3) the pathology of the eye is associated with achromatopsia and the therapeutic product is Cyclic Nucleotide Gated Channel Alpha 3 (CNGA3).

32. The method of any one of claims 1-31, wherein the recombinant viral vector further comprises a nucleotide sequence encoding a promoter or an enhancer-promoter, which nucleotide sequence encoding the promoter or enhancer-promoter is operably linked to the nucleotide sequence encoding the therapeutic product, and wherein the promoter or enhancer-promoter is:
(1) a CAG promoter;
(2) a CBA promoter;
(3) a CMV promoter;
(4) a PR1.7 promoter;
(5) a Rhodopsin Kinase (GRK1) photoreceptor-specific enhancer-promoter;
(6) an hCARp promoter;
(7) an hRKp;
(8) a cone photoreceptor specific human arrestin 3 (ARR3) promoter;
(9) a rhodopsin promoter; or
(10) a U6 promoter.

33. The method of any one of claims 1-11 and 13-15, wherein the recombinant viral vector further comprises a nucleotide sequence encoding a cone-specific promoter, which nucleotide sequence encoding the cone-specific promoter is operably linked to the nucleotide sequence encoding the therapeutic product, and wherein:
(1) the pathology of the eye is associated with red-green color blindness and the therapeutic product is L opsin (OPN1LW);
(2) the pathology of the eye is associated with red-green color blindness and the therapeutic product is M opsin (OPN1MW);
(3) the pathology of the eye is associated with blue cone monochromacy and the therapeutic product is M opsin (OPN1MW);
(4) the pathology of the eye is associated with cone dystrophy and the therapeutic product is Guanylate Cyclase Activator 1A (GUCA1A); or
(5) the pathology of the eye is associated with blue cone monochromacy (BCM) and the therapeutic product is L opsin (OPN1LW).

34. The method of any one of claims 1-33, wherein the administering step delivers a therapeutically effective amount of the therapeutic product to the retina of said human subject.

35. The method of claim 34, wherein the therapeutically effective amount of the therapeutic product is produced by human retinal cells of said human subject.

36. The method of claim 34, wherein the therapeutically effective amount of the therapeutic product is produced by human photoreceptor cells, horizontal cells, bipolar cells, amacrine cells, retina ganglion cells, and/or retinal pigment epithelial cells in the external limiting membrane of said human subject.

37. The method of claim 36, wherein the human photoreceptor cells are cone cells and/or rod cells.

38. The method of claim 36, wherein the retina ganglion cells are midget cells, parasol cells, bistratified cells, giant retina ganglion cells, photosensitive ganglion cells, and/or Müller glia.

39. The method of any one of claims 1-38, wherein the recombinant viral vector is an rAAV vector.

40. The method of claim 39, wherein the recombinant viral vector is an rAAV8 vector.

41. The method of any one of claims 1-40, which further comprises, after the administering step, a step of monitoring the post ocular injection thermal profile of the injected material in the eye using an infrared thermal camera.

42. The method of claim 41, wherein the infrared thermal camera is an FLIR T530 infrared thermal camera.

43. The method of any one of claims 1-43, wherein the recombinant nucleotide expression vector is administered at a dose about 6.0×10¹⁰ genome copies per eye.

44. The method of any one of claims 1-43, wherein the recombinant nucleotide expression vector is administered at a dose about 1.6×10¹¹ genome copies per eye.

45. The method of any one of claims 1-43, wherein the recombinant nucleotide expression vector is administered at a dose about 2.5×10¹¹ genome copies per eye.

46. The method of any one of claims 1-43, wherein the recombinant nucleotide expression vector is administered at a dose about 5.0×10¹¹ genome copies per eye.

47. The method of any one of claims 1-43, wherein the recombinant nucleotide expression vector is administered at a dose about 3.0×10¹² genome copies per eye.
